(19) United States
(12) Patent Application Publication
(10) Pub. No.: US 2025/0263738 A1
(43) Pub. Date: Aug. 21, 2025

(54) MODIFIED VIRUSES AND VIRAL PARTICLES, METHODS OF MAKING, AND USES THEREOF

(71) Applicant: The Regents of the University of California, Oakland, CA (US)

(72) Inventors: Prashant Mali, La Jolla, CA (US); Dhruva Katrekar, La Jolla, CA (US); Lauren Hodge, La Jolla, CA (US); Kyle M. Ford, La Jolla, CA (US); Andrew Portell, La Jolla, CA (US)

(21) Appl. No.: 18/285,000

(22) PCT Filed: Apr. 1, 2022
(86) PCT No.: PCT/US2022/023177

§ 371 Date: Sep. 29, 2023

Related U.S. Application Data
(60) Provisional application No. 63/170,100, filed on Apr. 2, 2021.

(51) Int. Cl. C12N 15/86; A61K 48/00; C40B 40/08

(52) U.S. Cl. CPC C12N 15/86; A61K 48/0041; C40B 40/08; C12N 2740/15043; C12N 2750/14122; C12N 2750/14143; C12N 2750/14145

(57) ABSTRACT

The disclosure provides methods for coating viruses and viral particles with membrane fragments to circumvent immune responses, the coated viruses and viral particles resulting therefrom, and the use of the coated viruses and viral particles in various applications, including gene therapy and genome engineering applications. The disclosure further provides methods for making ligand-modified viruses and viral particles, the ligand-modified modified viruses and viral particles resulting therefrom, and the use of the ligand-modified modified viruses and viral particles in various applications, including gene therapy and genome engineering applications.

### STATEMENT OF GOVERNMENT SUPPORT

[0001] This invention was made with Government support under Grant Nos. CA222826, GM123313, and HG009285, awarded by the National Institutes of Health. The Government has certain rights in the invention.

### CROSS REFERENCE TO RELATED APPLICATIONS

[0002] This application is a U.S. National Phase Application filed under 35 U.S.C. § 371 and claim priority to International Application No. PCT/US2022/023177, filed Apr. 1, 2022, which application claims priority under 35 U.S.C. § 119 from Provisional Application Ser. No. 63/170,100 filed Apr. 2, 2021, the disclosures of which are incorporated herein by reference.

### TECHNICAL FIELD

[0003] The disclosure provides methods for coating viruses and viral particles with membrane fragments to circumvent immune responses, the coated viruses and viral particles resulting therefrom, and the use of the coated viruses and viral particles in various applications, including gene therapy and genome engineering applications. The disclosure further provides methods for making ligand-modified viruses and viral particles, the ligand-modified modified viruses and viral particles resulting therefrom, and the use of the ligand-modified modified viruses and viral particles in various applications, including gene therapy and genome engineering applications.

### SEQUENCE LISTING

[0004] The instant application contains a Sequence Listing which has been submitted electronically in ASCII format and is hereby incorporated by reference in its entirety. Said ASCII copy, generated on Apr. 1, 2022, is named Sequence_ST25.txt and is 3,604,142 bytes in size.

### BACKGROUND

[0005] Viral gene therapy is a method to directly target mutations at a molecular level. Viruses are effective at delivering genes into the nucleus of the cell, but are easily recognized by the immune system, which can lead to increased side effects and rapid clearance. Adeno-associated virus (AAV) has been used increasingly as a promising vector for viral gene therapy. AAV is a small, non-enveloped virus that can transduce both dividing and quiescent cells, making it useful for many applications in viral gene therapy. The host's immune response to AAV is not a systemic response, and is limited to neutralizing antibodies, which leads to clearance, but no side effects. AAV is also nonpathogenic and therefore generally regarded as safe. Therefore, AAV has great potential in viral gene therapy if shielded from the immune system during transport.

[0006] There are currently multiple strategies being developed in an attempt to improve gene delivery by AAVs. A common method is shielding the AAV in a polymer such as polyethylene glycol (PEG). The difficulty with this strategy is that above an important ratio of polymer added to the virus, the transduction efficiency is significantly affected. Therefore, there is an upper limit to the amount of polymer that can be used to coat the viral vector; however, this upper limit is not sufficient to fully protect from the immune response. For example, one paper found that the upper limit of PEG that did not interfere with viral transduction was only protective against antibodies up to 6% of their normal concentration in human serum. Therefore, this method is not feasible in human trials, where the levels of antibodies in serum would completely neutralize the shielding effect. Also there have been recent studies indicating some patients receiving PEG coated nanoparticles develop antibodies against the polymer. Extracellular vesicles or exosomes naturally produced by cells have also been used to encapsulate AAVs, similarly synthetic lipid nanoparticles or liposomes have been used as a shield. These methods are able to protect against antibodies at higher concentrations than the polymer coating method however the transduction efficiencies often decreased. In general, it appears the larger size of these vesicle or exosomes bound AAVs hinders their ability to disseminate throughout the body and infect a wide range of cell types. For each of these methods, the addition of certain proteins or other molecules have been investigated as a way to improve efficiency, and while cell targeting and transduction efficiencies can be improved, the neutralizing effects of antibodies still present a challenge.

### SUMMARY

[0007] The disclosure provides a viral vector having a capsid protein comprising a heterologous targeting peptide in a range of 10-30 amino acids in length. In one embodiment, the heterologous targeting peptide is about 15-25 amino acids in length. In another or further embodiment, the heterologous targeting peptide is about 20 amino acids in length. In another or further embodiment, the viral vector is an adeno-associated virus (AAV). In another or further embodiment, the viral vector is a lentiviral vector. In another or further embodiment, the capsid protein is a VP1 capsid protein. In another or further embodiment, the capsid protein is a VP2 capsid protein. In another or further embodiment, the capsid protein is a VP3 capsid protein. In another or further embodiment, the heterologous targeting peptide is inserted into an AAV capsid protein at loop 1 and/or loop 2. In another or further embodiment, the viral vector is an AAV5. In another or further embodiment, the viral vector is an AAV9). In another or further embodiment, the heterologous targeting peptide is flanked by a linker peptide at the N-terminal and C-terminal ends of the heterologous targeting peptide. In another or further embodiment, the heterologous targeting peptide is flanked by a linker peptide at the N-terminal and C-terminal ends of the heterologous targeting peptide. In another or further embodiment, the heterologous targeting peptide targets the viral vector to hepatocytes or liver tissue. In another or further embodiment, the heterologous targeting peptide targets the viral vector to neuronal cells or brain tissue. In another or further embodiment, the heterologous targeting peptide targets the viral vector to pancreatic cells or pancreas tissue. In another or further embodiment, the heterologous targeting peptide targets the viral vector to cardiac cells or heart tissue. In another or further embodiment, the heterologous targeting peptide targets the viral vector to lung tissue. In another or further embodiment, the heterologous targeting peptide targets the viral vector to intestinal tissue. In another or further embodiment, the heterologous targeting peptide targets the viral vector to spleen tissue. In another or further embodiment, the heterologous targeting peptide targets the viral vector to renal cells or kidney tissue. In another or further embodiment, the heterologous targeting peptide targets the viral vector to muscle cells or tissue.

[0008] The disclosure also provides an adeno-associated virus (AAV) capsid protein comprising a heterologous targeting peptide cloned into loop 1 and/or loop 2 of the capsid protein, wherein the heterologous targeting peptide is about 10-30 amino acids in length. In one embodiment, the capsid protein is a VP1 capsid protein. In another embodiment, the capsid protein is a VP2 capsid protein. In still another embodiment, the capsid protein is a VP3 capsid protein. In another or further embodiment, the heterologous targeting peptide is about 15-25 amino acids in length. In another or further embodiment, the heterologous targeting peptide is about 20 amino acids in length. In another or further embodiment, the heterologous targeting peptide is flanked by a linker peptide at the N-terminal and C-terminal ends of the heterologous targeting peptide. In another or further embodiment, the heterologous targeting peptide targets hepatocytes or liver tissue. In another or further embodiment, the heterologous targeting peptide targets neuronal cells or brain tissue. In another or further embodiment, the heterologous targeting peptide targets pancreatic cells or pancreas tissue. In another or further embodiment, the heterologous targeting peptide targets cardiac cells or heart tissue. In another or further embodiment, the heterologous targeting peptide targets lung tissue. In another or further embodiment, the heterologous targeting peptide targets intestinal tissue. In another or further embodiment, the heterologous targeting peptide targets spleen tissue. In another or further embodiment, the heterologous targeting peptide targets renal cells or kidney tissue. In another or further embodiment, the heterologous targeting peptide targets muscle cells or tissue.

[0009] The disclosure also provides recombinant AAV (rAAV) comprising a capsid protein of the disclosure comprising a targeting peptide.

[0010] The disclosure also provides a recombinant AAV (rAAV) comprising a capsid protein having a targeting peptide in loop 1 and/or loop 2 wherein the targeting peptide is independently selected from SEQ ID Nos:5865 to 11445. In another or further embodiment, the recombinant AAV further comprises a heterologous polynucleotide for gene delivery In another or further embodiment, the heterologous polynucleotide is a therapeutic gene.

[0011] The disclosure also provides a composition comprising the recombinant rAAV of the disclosure. In one embodiment, the composition further comprises a pharmaceutically acceptable carrier.

[0012] The disclosure also provides a method for delivering a transgene to a subject comprising: administering a recombinant AAV (rAAV) to a subject, wherein the rAAV comprises: (i) a capsid protein of the disclosure comprising a targeting peptide, and (ii) at least one transgene, and wherein the rAAV infects cells of a target tissue of the subject. In another or further embodiment, the at least one transgene encodes a protein. In another or further embodiment, the protein is an immunoglobulin heavy chain or light chain or fragment thereof. In another or further embodiment, the at least one transgene encodes a small interfering nucleic acid. In another or further embodiment, the small interfering nucleic acid is a miRNA. In another or further embodiment, the small interfering nucleic acid is a miRNA sponge or TuD RNA that inhibits the activity of at least one miRNA in the subject or animal. In another or further embodiment, the miRNA is expressed in a cell of the target tissue. In another or further embodiment, the target tissue is skeletal muscle, heart, liver, pancreas, brain or lung. In another or further embodiment, the transgene expresses a transcript that comprises at least one binding site for a miRNA, wherein the miRNA inhibits activity of the transgene, in a tissue other than the target tissue, by hybridizing to the binding site. In another or further embodiment, the at least one transgene encodes a gene product that mediates genome editing. In another or further embodiment, the transgene comprises a tissue specific promoter or inducible promoter. In another or further embodiment, the tissue specific promoter is a liver-specific thyroxin binding globulin (TBG) promoter, an insulin promoter, a glucagon promoter, a somatostatin promoter, a pancreatic polypeptide (PPY) promoter, a synapsin-1 (Syn) promoter, a creatine kinase (MCK) promoter, a mammalian desmin (DES) promoter, a a-myosin heavy chain (a-MHC) promoter, or a cardiac Troponin T (cTnT) promoter. In another or further embodiment, the rAAV is administered intravenously, intravascularly, transdermally, intraocularly, intrathecally, orally, intramuscularly, subcutaneously, intranasally, or by inhalation. In another or further embodiment, the subject is selected from a mouse, a rat, a rabbit, a dog, a cat, a sheep, a pig, and a non-human primate. In another or further embodiment, the subject is a human.

[0013] The disclosure provides an isolated nucleic acid encoding an AAV capsid protein containing an amino acid sequence selected from the group consisting of SEQ ID No:5865 to 11444 and 11445. The disclosure also provides a composition comprising the isolated AAV capsid protein.

[0014] The disclosure also provides a kit for producing a rAAV, the kit comprising: a container housing an isolated nucleic acid encoding a capsid protein comprising a targeting peptide of the disclosure. In one embodiment, the kit further comprises instructions for producing the rAAV. In another or further embodiment, the kit further comprises at least one container housing a recombinant AAV vector, wherein the recombinant AAV vector comprises a transgene.

[0015] The disclosure also provides a method for coating a virus or viral particle with membrane fragments comprising: lysing donor cells in a hypotonic solution, which optionally may be combined with Dounce homogenization or sonication, in order to fractionate the cell membrane; removing cells and cell debris by one or more rounds of centrifugation, leaving a membrane enriched fraction; extruding the membrane enriched faction through polycarbonate membrane(s) to generate purified membrane fragments; and coating virus or viral particles by coextruding the virus or viral particles with the purified membrane fragments through polycarbonate membrane(s). In another or further embodiment, the viruses or viral particles are non-enveloped viruses or viral particles. In another or further embodiment, the viruses or viral particles are enveloped viruses or viral particles which have had their viral envelope removed. In another or further embodiment, the viruses or viral particles are selected from retroviruses, adenovirus, adeno-associated virus, hybrid adenoviruses, alphavirus, herpes simplex virus, poxvirus, Epstein-Barr virus and lentivirus. In another or further embodiment, the viruses or viral particles are adeno-associated viruses (AAV). In another or further embodiment, the viruses or viral particles have been modified by directed evolution to have increased neutralizing antibody-evasion properties, as well as enhanced gene delivery, gene targeting, and/or enhanced capacity to infect. In another or further embodiment, the viruses or viral particles have been modified by one or more amino acid substitutions in one or more regions of a viral capsid protein so as to reduce the affinity of the viral capsid protein for the major histocompatibility complex. In another or further embodiment, the donor cells are mammalian cells. In another or further embodiment, the donor cells are human cells. In another or further embodiment, the donor cells are human stem cells, human progenitor cells, human primary cells, human somatic cells, human germline cells, or human tumor cells. In another or further embodiment, the membranes of the donor cells have been modified to express or present a targeting ligand. In another or further embodiment, the targeting ligand is used to improve entry of the coated viruses or viral particles into target cells, inhibit components of the immune response to the coated viruses or viral particles, or to target the coated viruses or viral particles to certain cell types or organs In another or further embodiment, the targeting ligand is a peptide, antibody or antibody fragment. In another or further embodiment, the targeting ligand comprises a peptide of any one of SEQ ID Nos:5865 to 11445.

[0016] The disclosure also provides coated viruses or viral particles made by the method described above. In another or further embodiment, the coated viruses or viral particles have been modified to comprise a targeting ligand. In another or further embodiment, the coated viruses or viral particles are used to deliver transgene(s) into target cells. In another or further embodiment, the coated viruses or viral particles are used to genome engineer target cells.

[0017] The disclosure also provides a pharmaceutical composition comprising the coated viruses or viral particles and a pharmaceutically acceptable carrier, diluent, binder and/or filler.

[0018] The disclosure also provides a method of treating a subject suffering from a disease or disorder in need of treatment thereof, comprising administering the coated viruses or viral particles or the pharmaceutical composition of the disclosure.

[0019] The disclosure also provides an engineered viral particle comprising an artificially prepared lipid envelope.

[0020] The disclosure provides a method of preparing an engineered retroviral particle, the method comprising treating a retroviral particle with a detergent to remove a lipid envelop to obtain naked retroviral particles, isolating the naked retroviral particles and co-extruding a lipid envelop with the naked retroviral particles to obtain an engineered retroviral particle.

### DESCRIPTION OF DRAWINGS

[0021] FIG. 1A-B provides embodiment of methodologies that can be used to (A) prepare cell membrane fragments for (B) coating adeno-associated viruses (AAV).

[0022] FIG. 2 illustrates how the coated AAVs of the disclosure can provide for higher transgene expression in vivo by minimizing immune detection and clearance.

[0023] FIG. 3 presents the standard recognized model of the relationship between ‘uncoated’ AAV capsid dose and outcome of gene transfer following systemic vector delivery. Low ‘uncoated’ capsid doses are more likely to be neutralized by anti-AAV antibodies, even low-titer NAb. This results in lack of efficacy. Higher ‘uncoated’ capsid doses overcome this limitation, leading to therapeutic efficacy. Capsid-specific T-cell activation is detected as the total uncoated capsid dose administered increases. This does not affect efficacy until an important threshold is reached, above which immune-mediated clearance of transduced target cells results in loss of efficacy. The ‘coated’ AAVs of the disclosure, unlike the ‘uncoated’ AAVs described above and presented in FIG. 3, can achieve efficacy at much lower doses, as the ‘coated’ AAVs made by the methods presented herein are far less likely to be neutralized by anti-AAV antibodies.

[0024] FIG. 4 illustrates how the coated AAVs of the disclosure can be engineered to have tissue specificity using targeting ligands, thereby providing for programmable tropism.

[0025] FIG. 5 shows an overall workflow for rationally engineering AAV variants and screening them in vivo. The pie chart depicts the distribution of categories from which protein sources of peptides were selected. These proteins were tiled into 20-mer peptides and synthesized on an oligonucleotide pool. DNA coding for the peptides were then inserted into distinct locations on the AAV capsid enabling production of AAV5 and AAV9 variants for a total of ˜1.1 million capsid variants. AAVs were then injected retro-orbitally into replicate mice. Two weeks later, organs, including the liver, spleen, brain, large intestine, lung, kidney, heart, skeletal muscle, and pancreas were harvested. DNA was isolated from these tissues, the peptide insertion region was selectively PCR-amplified and prepared for sequencing, and then paired-end 100 deep sequencing was performed using the Illumina NovaSeq platform to analyze transducing variants.

[0026] FIG. 6A-B shows engineering peptide-displaying AAV variants. (a) Icosahedral structural rendering of the AAV5 capsid. Surface residues are colored according to their distance from the capsid center with specific amino acid residues highlighted to illustrate the location of the Loop1 (red) and Loop2 (salmon) inserts. (b) Cloning strategy shown for inserting the peptide library into the wild-type AAV backbone with flanking G-S residues, AAV5-Loop1 shown as an example. The AAV backbone was modified at the desired location to insert two DNA sequences encoding Glycine and Serine, along with two PaqCI type IIS restriction sites flanking an approximately 60-base pair filler region to be cut out. The peptide insert library is flanked by two PaqCI recognition sites for ligation upon restriction digest.

[0027] FIG. 7A-D shows plasmid and capsid level analysis. Polar plots illustrating the proportion of peptide library recovered after cloning the library into the cap gene and then packing the plasmid pool into functional AAV capsids for (a) AAV5-Loop1, (b) AAV5-Loop2, (c) AAV9-Loop1, and (d) AAV9-Loop2. Numbers on the perimeter represent total peptides quantified.

[0028] FIG. 8A-E shows a method of Identifying top transducing AAV variants. (a) On the left, a heatmap illustrating the AAV variants across all capsids and loops which have a log2fc>1 in both replicates, and FDR adjusted p<0.05 (one sample T test comparing capsid counts to organ counts). Shown to the right is a heatmap showing the levenshtein distance between the peptides in the left heatmap. The data has been filtered to remove peptides with no detected homology within the dataset. (c-e) Heatmaps showing final hits which have a Z-score (Z-normalized log2FC) greater than 2.5 in any organ, a log2(capsid count)>3, and at least one homologous peptide detected in the same organ. Heatmaps are separated by AAV serotype/insertion site.

[0029] FIG. 9A-B shows identifying pan-organ and organ specific AAV variants. (a) Pan-organ transducing AAV variants. Pan-organ specific AAVs were identified by taking the average log2FC across all organs for each capsid/loop. Shown in the heatmap are all variants which have an average (across all organs) log2FC greater than 1. (b) Organ specific AAV variants. Organ specific AAVs were identified via an ANOVA test, comparing the log2FC values in one organ versus all the others. AAV variants were then ranked to identify the variants with the lowest p-values. The log2FC values for the AAV variants with the 5 lowest p values for each organ are plotted in the heatmap.

[0030] FIG. 10A-C shows an overview of lentiviral display strategy. (a) Plasmid map showing key genetic material packaged into lentiviral particles. Each lentiviral particle contains the RNA coding for a displayed peptide, as well as a puromycin resistance gene under the control of the same promoter. (b) Cartoon diagram of engineered lentivirus, showing displayed peptides and mutant VSVG protein. (c) Cartoon diagram showing cell lines of interest screened via lentiviral display strategy. Cell lines cover a variety of lineages and tissue types to enable development of tissue specific lentiviral particles.

[0031] FIG. 11 provides a table of AAV targeting hits in the indicated tissues.

[0032] FIG. 12 provides a table of Lentivirus targeting hits in the indicated cells.

[0033] FIG. 13 presents a wild type DNA and peptide sequences for AAV5. Further indicated is the Loop 1 and Loop 2 insertion sites in the wildtype sequences for AAV5, as highlighted in lighter gray and medium gray, respectively.

[0034] FIG. 14 presents a wild type DNA and peptide sequences for AAV9. Further indicated is the Loop 1 and Loop 2 insertion sites in the wildtype sequences for AAV9, as highlighted in lighter gray and medium gray, respectively.

### DETAILED DESCRIPTION

[0035] As used herein and in the appended claims, the singular forms “a,” “an,” and “the” include plural referents unless the context clearly dictates otherwise. Thus, for example, reference to “a virus” includes a plurality of such viruses and reference to “the viral particle” includes reference to one or more viral particles and equivalents thereof known to those skilled in the art, and so forth.

[0036] Also, the use of “or” means “and/or” unless stated otherwise. Similarly, “comprise,” “comprises,” “comprising” “include,” “includes,” and “including” are interchangeable and not intended to be limiting.

[0037] It is to be further understood that where descriptions of various embodiments use the term “comprising,” those skilled in the art would understand that in some specific instances, an embodiment can be alternatively described using language “consisting essentially of” or “consisting of.”

[0038] Unless defined otherwise, all technical and scientific terms used herein have the same meaning as commonly understood to one of ordinary skill in the art to which this disclosure belongs. Although many methods and reagents are similar or equivalent to those described herein, the exemplary methods and materials are disclosed herein.

[0039] All publications mentioned herein are incorporated herein by reference in full for the purpose of describing and disclosing the methodologies, which might be used in connection with the description herein. Moreover, with respect to any term that is presented in one or more publications that is similar to, or identical with, a term that has been expressly defined in this disclosure, the definition of the term as expressly provided in this disclosure will control in all respects.

[0040] It should be understood that this disclosure is not limited to the particular methodology, protocols, and reagents, etc., described herein and as such may vary. The terminology used herein is for the purpose of describing particular embodiments or aspects only and is not intended to limit the scope of the present disclosure.

[0041] Other than in the operating examples, or where otherwise indicated, all numbers expressing quantities of ingredients or reaction conditions used herein should be understood as modified in all instances by the term “about.” The term “about” when used to described the present invention, in connection with percentages means ±1%.

[0042] The term “purified” when used in reference to viruses or viral particles disclosed herein refers to the fact that the virus is removed from the majority of other cellular components from which it was generated or in which it is typically present in nature, or from the coating agents disclosed herein. The coated viruses or viral particles disclosed herein are typically prepared to the state where they are purified or semi-purified.

[0043] An “effective amount” as the term is used herein, is used to refer to an amount that is sufficient to produce at least a reproducibly detectable amount of the desired results. An effective amount will vary with the specific conditions and circumstances. Such an amount can be determined by the skilled practitioner for a given situation.

[0044] The term “therapeutically effective amount” refers to an amount that is sufficient to affect a therapeutically significant reduction in one or more symptoms of the condition when administered to a typical subject who has the condition. A therapeutically significant reduction in a symptom is, e.g. about 10%, about 20%, about 30%>, about 40%>, about 50%, about 60%, about 70%, about 80%, about 90%, about 100%, or more as compared to a control or non-treated subject.

[0045] The term “treat” or “treatment” refers to therapeutic treatment wherein the object is to eliminate or lessen symptoms. Beneficial or desired clinical results include, but are not limited to, elimination of symptoms, alleviation of symptoms, diminishment of extent of condition, stabilized (i.e., not worsening) state of condition, delay or slowing of progression of the condition.

[0046] The terms “patient”, “subject” and “individual” are used interchangeably herein, and refer to an animal, particularly a human, to whom treatment including prophylactic treatment is provided. This includes human and non-human animals. The term “non-human animals” and “non-human mammals” are used interchangeably herein includes all vertebrates, e.g., mammals, such as non-human primates, (particularly higher primates), sheep, dog, rodent (e.g. mouse or rat), guinea pig, goat, pig, cat, rabbits, cows, and non-mammals such as chickens, amphibians, reptiles etc. In one embodiment, the subject is human. In another embodiment, the subject is an experimental animal or animal substitute as a disease model. “Mammal” refers to any animal classified as a mammal, including humans, non-human primates, domestic and farm animals, and zoo, sports, or pet animals, such as dogs, cats, cattle, horses, sheep, pigs, goats, rabbits, etc. Patient or subject includes any subset of the foregoing, e.g., all of the above, but excluding one or more groups or species such as humans, primates or rodents. A subject can be male or female. A subject can be a fully developed subject (e.g., an adult) or a subject undergoing the developmental process (e.g., a child, infant or fetus).

[0047] Gene therapy is the process of introducing foreign genomic materials into host cells to elicit a therapeutic benefit. Although initially the main focus of gene therapy was on special genetic disorders, now diverse diseases with different patterns of inheritance and acquired diseases are targets of gene therapy. Basically, gene therapy is an intracellular delivery of genomic materials (transgene) into specific cells to generate a therapeutic effect by correcting an existing abnormality or providing the cells with a new function. Different types of gene delivery systems may be applied in gene therapy to restore a specific gene function or turning off a special gene(s). The ultimate goal of gene therapy is single administration of an appropriate material to replace a defective or missing gene. One of the successful gene therapy systems available today are viral vectors, such as retrovirus, adenovirus (types 2 and 5), adeno-associated virus, herpes virus, pox virus, human foamy virus (HFV), and lentivirus. All viral vector genomes have been modified by deleting some areas of their genomes so that their replication becomes deranged and it makes them safer, but the system has some problems, such as their marked immunogenicity that causes induction of inflammatory system leading to degeneration of transduced tissue; and toxin production, including mortality, the insertional mutagenesis; and their limitation in transgenic capacity size. During the past few years some viral vectors with specific receptors have been designed that could transfer the transgenes to some other specific cells, which are not their natural target cells (retargeting).

[0048] Adenoviral vectors have been isolated from a large number of different species, and more than 100 different serotypes have been reported. Most adults have been exposed to the adenovirus serotypes most commonly used in gene therapy (types 2 and 5). Adenoviruses type 2 and 5 can be utilized for transferring both dividing and nondividing cells and have low host specificity so can be used for gene delivery into large range of tissues.

[0049] Adeno-associated vectors (AAV) are like adenoviral vectors in their features but because of having some deficiency in their replication and pathogenicity, are safer than adenoviral vectors. In human, AAVs are not associated with any disease. Another special character of AAV is their ability to integrate into a specific site on chromosome 19 with no noticeable effects cause long-term expression in vivo. The major disadvantages of these vectors are complicated process of vector production and the limited transgene capacity of the particles (up to 4.8 kb). AAVs have been used in the treatment of some diseases, such as CF, hemophilia B, Leber congenital amaurosis, and AAT (Alpha-1 antitrypsin) deficiency.

[0050] Current AAV gene delivery system does not allow for repeated treatments, due to the immune response generated in the patient if a second dose is attempted. Currently there are methods of shielding AAVs to avoid this scenario but experimental data shows that there is an improvement only for avoiding small amounts of neutralizing antibodies. As stated above, methods like coating with polymers face a challenge of the proper ratio of AAV to polymer. If the polymer concentration is too high then the ability of the AAV to enter the cell is compromised, but if the polymer concentration is low enough to preserve the transduction efficiency, then there is little protection against antibodies. Vesicle and exosome encapsulation can also be a way to shield the AAV from the immune system but the increase in size generally reduces the ability of the AAV to infect a broad range of cell types, which traditionally was one of the advantages to using AAVs. Therefore, these methods are not effective in normal physiological conditions. One of the main advantages of AAVs is their small size (25 nm) which allows them to transduce most tissues of the body. The strategies employing native vesicles may help get around the response of the immune system but the increased size negatively impacts transduction efficiencies.

[0051] The disclosure provides methods that can be used to coat AAV and other viruses by using fragments of purified cell membranes to coat the viruses. As such, the methods of the disclosure are especially suited to coating naturally occurring non-enveloped viruses, like adenoviruses or AAVs. For example, one can coat a non-enveloped AAV using the methods disclosed herein, thereby providing for a coated AAV of a specific size that has the surface properties of a native cell with the advantages of small size. Additionally, the methods of the disclosures can be used with enveloped viruses, like retroviruses. In such a case, the envelope of the virus may be first removed using standard methods, like detergent treatment, and then be coated with membrane fragment using the methods disclosed herein. In doing so, new, non-standard applications for the ‘coated’ virus can be possibly realized, such as an increased host range, and programmable tropism. Accordingly, the methods of the disclosure allow for, e.g., the production of coated viruses or viral particles that are recognized as self by the immune system, thereby preventing an immunogenic response, while also retaining the ability to transduce many different cell types.

[0052] The disclosure further provides methods for rationally engineering novel viral variants (e.g., AAV variants) and identifying transducing capsids which exhibit strong activity and organ specificity in vivo (see FIG. 5). In a particular embodiment, the disclosure provides a viral vector having a capsid protein comprising a heterologous targeting peptide of 10, 11, 12. 13, 14, 15, 16, 17, 18, 19, 20, 21, 22, 23, 24, 25, 26, 27, 28, 29, 30 amino acids in length, or a range that includes or is between any two of the foregoing amino acid lengths (e.g., 10-30 amino acids in length, 15-25 amino acids in length, etc.). In a particular embodiment, the heterologous targeting peptide is about 20 amino acids in length. In regards to the transducing capsid, the capsid can be of any type of capsid proteins. including but not limited to, VP1, VP2, VP3, N protein, and HHV capsid portal protein. In a particular embodiment, the capsid protein is a VP1 capsid protein. In another embodiment, the capsid protein is a VP2 capsid protein. In yet another embodiment, the capsid protein is a VP3 capsid protein. Examples of viruses and viral particles, or vectors encoding thereof, which can be used in the methods of the disclosure include, but are not limited to, retroviruses, adenovirus, adeno-associated virus, hybrid adenoviruses, alphavirus, herpes simplex virus, poxvirus, Epstein-Barr virus and lentivirus.

[0053] Adenoviruses are able to deliver large DNA particles (up to 38 kb), but in contrast to retroviruses, as they would not integrate into the host genome, their gene expression is too short term. Natural and acute immunologic responses against adenoviruses have made their clinical application limited to a few tissues, such as liver, lung (especially for CF (Cystic Fibrosis) treatment), or localized cancer gene therapy. Another viral gene delivery system useful in the present methods utilizes adenovirus-derived vectors. The genome of an adenovirus can be manipulated, such that it encodes and expresses a gene product of interest but is inactivated in terms of its ability to replicate in a normal lytic viral life cycle. See, for example, Berkner et al., BioTechniques 6:616 (1988): Rosenfeld et al., Science 252:431-434 (1991); and Rosenfeld et al., Cell 68: 143-155 (1992). Suitable adenoviral vectors derived from the adenovirus strain Ad type 5 dl324 or other strains of adenovirus (e.g., Ad2, Ad3, or Ad7 etc.) are known to those skilled in the art. Recombinant adenoviruses can be advantageous in certain circumstances, in that they are not capable of infecting non-dividing cells and can be used to infect a wide variety of cell types, including epithelial cells (Rosenfeld et al., (1992) supra). Furthermore, the virus particle is relatively stable and amenable to purification and concentration, and as above, can be modified so as to affect the spectrum of infectivity. Additionally, introduced adenoviral DNA (and foreign DNA contained therein) is not integrated into the genome of a host cell but remains episomal, thereby avoiding potential problems that can occur as a result of insertional mutagenesis in situ, where introduced DNA becomes integrated into the host genome (e.g., retroviral DNA). Moreover, the carrying capacity of the adenoviral genome for foreign DNA is large (up to 8 kilobases) relative to other gene delivery vectors (Berkner et al., supra; Haj-Ahmand and Graham, J. Virol. 57:267 (1986)).

[0054] Retroviruses are one of the most frequently employed forms of gene delivery in somatic and germline gene therapies. Retroviruses in contrast to adenoviral and lentiviral viruses, can transfect dividing cells because they can pass through the nuclear pores of mitotic cells; this character of retroviruses make them proper candidates for in situ treatment. In addition, all of the viral genes have been removed, creating approximately 8 kb of space for transgenic incorporation. Retroviruses are useful for ex vivo delivery of somatic cells because of their ability to linearly integrate into host cell genome; for example, they have been used for human gene therapy of X-SCID successfully but incidence of leukemia in some patients occurred because of integration of retroviruses to the LMO2 gene and inappropriate activation of it. Retroviruses also have been applied for familial hyperlipidemia gene therapy and tumor vaccination. However, the main limitations of retroviruses are their low efficiency in vivo, immunogenic problems, the inability to transduce the nondividing cells and the risk of insertion, which could possibly cause oncogene activation or tumor-suppressor gene inactivation. A replication defective retrovirus can be packaged into virions, which can be used to infect a target cell through the use of a helper virus by standard techniques. Protocols for producing recombinant retroviruses and for infecting cells in vitro or in vivo with such viruses can be found in Ausubel, et al, eds., Current Protocols in Molecular Biology, Greene Publishing Associates, (1989), Sections 9.10-9.14, and other standard laboratory manuals. Examples of suitable retroviruses include pLJ, pZIP, pWE and pEM which are known to those skilled in the art. Examples of suitable packaging virus lines for preparing both ecotropic and amphotropic retroviral systems include Ψ&\acute{ι}ρ, Ψ&ε, Ψ2 and ΨAπι. Retroviruses have been used to introduce a variety of genes into many different cell types, including epithelial cells, in vitro and/or in vivo (see for example Eglitis, et al. (1985) Science 230: 1395-1398: Danos and Mulligan (1988) Proc. Natl. Acad. Sci. USA 85:6460-6464; Wilson et al. (1988) Proc. Natl. Acad. Sci. USA 85:3014-3018: Armentano et al. (1990) Proc. Natl. Acad. Sci. USA 87:6141-6145; Huber et al. (1991) Proc. Natl. Acad. Sci. USA 88:8039-8043; Ferry et al. (1991) Proc. Natl. Acad. Sci. USA 88:8377-8381: Chowdhury et al. (1991) Science 254: 1802-1805; van Beusechem et al. (1992) Proc. Natl. Acad. Sci. USA 89:7640-7644; Kay et al. (1992) Human Gene Therapy 3:641-647; Dai et al. (1992) Proc. Natl. Acad. Sci. USA 89: 10892-10895; Hwu et al. (1993) J. Immunol. 150:4104-4115: U.S. Pat. Nos. 4,868,116; 4,980,286; PCT Application WO 89/07136; PCT Application WO 89/02468; PCT Application WO 89/05345; and PCT Application WO 92/07573).

[0055] Hybrid adenoviruses are made of the high transduction efficiency of a gene-deleted adenoviral vector and the long-term genome-integrating potential of adeno-associated and retroviruses viruses. Such hybrid systems show stable transduction and limited integration sites. Among integrating vectors, those derived from retroviruses are most common. One of the family of Retroviridae are called spuma retroviruses or foamy viruses (FVs). FVs are a group of apparently nonpathogenic nonhuman retroviruses, which have been developed only recently. The potential advantages of FV vectors include a broad range of hosts, the largest packaging capacity of any retrovirus, and the ability to persist in quiescent cells. Because of these features, FVs have the unique potential to safely and efficiently deliver several genes into a number of different types of cells.

[0056] Alphaviruses can also be used. Alphaviruses are enveloped single stranded RNA viruses that have a broad host range, and when used in viral gene therapy protocols alphaviruses can provide high-level transient gene expression. Exemplary alphaviruses include the Semliki Forest virus (SFV), Sindbis virus (SIN) and Venezuelan Equine Encephalitis (VEE) virus, all of which have been genetically engineered to provide efficient replication-deficient and -competent expression vectors. Alphaviruses exhibit significant neurotropism, and so are useful for CNS-related diseases. See, e.g., Lundstrom, Viruses. 2009 June; 1(1); 13-25; Lundstrom, Viruses. 2014 June; 6(6): 2392-2415; Lundstrom, Curr Gene Ther. 2001 May; 1(1): 19-29; Rayner et al., Rev Med Virol. 2002 September-October; 12(5):279-96.

[0057] Herpes simplex virus (HSV) is one of the recent viruses candidate in gene delivery. HSV systems include the development of the so-called disabled infectious single copy (DISC) viruses, which comprise a glycoprotein H defective mutant HSV genome. When the defective HSV propagated in complementing cells' viral particles are generated, they can infect in subsequent cells permanently replicating their own genome but not producing more infectious particles. Herpes vectors can deliver up to 150 kb transgenic DNA and because of its neuronotropic features, it has the greatest potential for gene delivery to nervous system, tumors, and cancer cells.

[0058] Epstein-Barr virus as a herpes virus can be used for the expression of large DNA fragments in target cells. Because Epstein Barr virus (EBV) establishes itself in the host nucleus in a latent state as extrachromosomal circular plasmid, this virus is suitable for long-term retention in the target cell. Because of the natural B-cell tropism of the virus, EBV-derived vectors, such as B-cell lymphoma, have been tested for immune therapy of cancer.

[0059] Poxvirus vectors are members of the Poxviridae family that are widely used for high-level cytoplasmatic expression of transgenes. The high stable insertion capacity (more than 25 KB) of this virus is the most advantageous feature of it for gene delivery. The insertion of the transgene sequences is somewhat different from the other vector systems and utilizes homologous recombination or in vitro ligation for construction of recombinant vaccinia virus vectors. Poxviruses have been used for cancer therapy in various studies, such as prostate cancer, colorectal cancer, breast cancer, and lung cancer. Recombinant vaccinia virus vectors were also used for expression of E6 and E7 genes of human papilloma virus types 16 and 18 in cervical cancer patients to induce tumor regression.

[0060] Lentiviruses are a subclass of retroviruses. They have recently been used as gene delivery vectors due to their ability to naturally integrate with nondividing cells, which is the unique feature of lentiviruses as compared with other retroviruses, which can infect only the dividing cells. Lentiviral vectors can deliver 8 kb of sequence. Because lentiviruses have strong tropism for neural stem cells, extensively used for ex vivo gene transfer in central nervous system with no significant immune responses and no unwanted side effects. Lentiviral vectors have the advantages of high-efficiency infection of dividing and nondividing cells, long-term stable expression of a transgene, low immunogenicity, and the ability to accommodate larger transgenes. There are numerous examples of effective long-term treatment of animal models of neurologic disorders, such as motor neuron diseases, Parkinson, Alzheimer, Huntington's disease, lysosomal storage diseases, and spinal injury.

[0061] Adeno-associated viruses, from the parvovirus family, are small viruses with a genome of single stranded DNA. AAV was discovered in 1960s as a contaminant in adenovirus (a cold causing virus) preparations. Its growth in cells is dependent on the presence of adenovirus and, therefore, it was named as adeno-associated virus. AAV can infect both dividing and non-dividing cells and may incorporate its genome into that of the host cell. These features make AAV a very attractive candidate for creating viral vectors for gene therapy. The AAV viruses can insert genetic material at a specific site on chromosome 19 with near 100% certainty. There are a few disadvantages to using AAV, including the small amount of DNA it can carry (low capacity) and the difficulty in producing it. This type of virus is being used for gene therapy, however, because it is non-pathogenic (most people carry this harmless virus). AAV is a tiny non-enveloped virus having a 25 nm capsid. No disease is known or has been shown to be associated with the wild type virus. AAV has a single-stranded DNA (ssDNA) genome. AAV has been shown to exhibit long-term episomal transgene expression, and AAV has demonstrated excellent transgene expression in the brain, particularly in neurons. Vectors containing as little as 300 base pairs of AAV can be packaged and can integrate. Space for exogenous DNA is limited to about 4.7 kb. An AAV vector such as that described in Tratschin et al., Mol. Cell. Biol. 5:3251-3260 (1985) can be used to introduce DNA into cells. A variety of nucleic acids have been introduced into different cell types using AAV vectors (see for example Hermonat et al., Proc. Natl. Acad. Sci. USA 81:6466-6470 (1984); Tratschin et al., Mol. Cell. Biol. 4:2072-2081 (1985); Wondisford et al., Mol. Endocrinol. 2:32-39 (1988); Tratschin et al., J. Virol. 51:611-619 (1984); and Flotte et al., J. Biol. Chem. 268:3781-3790 (1993). There are numerous alternative AAV variants (over 100 have been cloned), and AAV variants have been identified based on desirable characteristics. For example, AAV9 has been shown to efficiently cross the blood-brain barrier. Moreover, the AAV capsid can be genetically engineered to increase transduction efficiency and selectivity, e.g., biotinylated AAV vectors, directed molecular evolution, self-complementary AAV genomes and so on. Modified AAV have also been described, including AAV based on ancestral sequences; see, e.g., U.S. Pat. No. 7,906,111; WO/2005/033321; WO2008027084, WO2014124282; WO2015054653; and WO2007127264.

[0062] In certain embodiment, the disclosure provides for the generation of modified AAVs engineered to contain heterologous targeting peptides that target the AAVs to certain cells and/or tissues. Modified AAVs disclosed herein are useful because they can effectively deliver nucleic acids of interest to a particular cell and/or tissue, e.g., for purposes of manipulating levels of a particular gene product in the cell and/or tissue. For example, in some embodiments, the disclosure provides modified AAVs comprising a capsid protein having a heterologous targeting peptide that confers unique tissue targeting and cell transduction properties. In some embodiments, such heterologous targeting peptides are useful for targeting AAVs to tissues of the central nervous system (CNS) (e.g., the brain), liver, muscle, lung, heart, spleen pancreas, intestine and/or kidney. In a further embodiment, the AAV used in the compositions, methods, and kits disclosed herein has a serotype selected from AAV1, AAV2, AAV3, AAV4, AAV5, AAV6, AAV7, AAV8, AAV9, AAV9.47, AAVrh10, AAVPHP.B, AAVPHP.eB, and AAVPHP.S. In a certain embodiment, the AAV used in the compositions, methods, and kits herein is AAV5. In another embodiment, the AAV used in the compositions, methods, and kits disclosed herein is AAV9.

[0063] The design and implementation of displaying a large, tiled peptide library in the capsid of multiple viral (e.g., AAV) serotypes is shown in the studies presented herein. The disclosure further provides methodology for performing an in vivo screen to identify transducing viral variants across multiple organs, the analytical pipeline to characterize the top-performing hits, and finally, the identity and potential application of top performing viral variants is also discussed herein. Hits from a targeting peptide screen with AAV and Lentivirus and their coding sequences are provided in the sequence listing and their targeted tissue or cells are presented in FIG. 11 and FIG. 12.

[0064] The heterologous targeting peptide-modified AAV variants identified here could be of broad use both clinically and experimentally. Based upon preliminary in vivo screening data, an expansive list of AAV variants with broad organ tropism were identified, these variants exhibited high log₂foldchange values in multiple organs in comparison to overall counts in the AAV capsid pool (see FIG. 9A). The ability of these AAV variants to transduce multiple organs at relatively low administered AAV doses allows for a lower overall titer of AAV that needs to be produced and delivered to achieve the same therapeutic benefit as current wild-type AAVs. This is especially important for reducing the overall costs of viral production, as well as limiting physiological exposure to the AAV vector in an effort to address the inherent immunogenicity of these gene delivery vehicles which has hindered prior efficacy of gene therapies in humans.

[0065] In addition to the broadly infective AAV variants discovered herein, the methods of the disclosure also identified several variants which enable organ-specific AAV transduction. These include AAV variants which specifically transduce the brain, lung, heart, skeletal muscle, pancreas, kidney, spleen, intestine, and liver (see FIG. 9B). Specific examples of the clinical utility of these organ-specific gene delivery vehicles are described in the following sections, however, any disease or condition in which a gene or genetic engineering protein should be expressed in a specific tissue or cell type could utilize the heterologous targeting peptide-modified AAV variants disclosed herein and achieve specific expression without the need for specialized promoters.

[0066] In the brain, a difficult organ to transduce due to the selectivity of the blood brain barrier, there are numerous diseases which would benefit from AAV that only target cell types in the central nervous system. Previous efforts to transduce the CNS have relied on difficult routes of administration such as intrathecal, intraparenchymal, and intracerebroventricular. The heterologous targeting peptide-modified AAV variants provided herein were shown to effectively transduce CNS cell types via systemic administration. For monogenic neurological disorders caused by specific gene mutations, these could be addressed with organ-specific AAV variants to address loss-of-function mutations (e.g. replacing survival motor neuron protein (SMN) for spinal muscular atrophy) or silencing harmful gain-of-function mutations (e.g. superoxide dismutase 1 (SOD1) for amyotrophic lateral sclerosis or huntingtin (HTT) for Huntington's disease. Other CNS diseases which currently have gene therapy based clinical trials ongoing, which would benefit from brain-specific AAV variants include Parkinson's disease, mucopolysaccaridosis type I, II and III, Batten disease, giant axonal neuropathy, and metachromatic leukodystrophy. Similarly, while it was not directly assessed in the initial screen, the AAV-engineering approach could greatly improve transgene delivery to the retina where mutations in >270 genes are implicated in hereditary retinal degeneration and could be addressed with an AAV-based gene therapy.

[0067] A similar paradigm exists in the lung where several diseases resulting from specific gene mutations have been addressed with AAVs administered through difficult means (i.e., intratracheal). Lung-specific AAV variants were identified with the methods presented herein, and therefore, the methods and compositions of the disclosure can be used to generate lung-specific AAV variants to treat various lung disease. Diseases which could be addressed include, but are not limited to, surfactant protein B deficiency, pulmonary vascular leakage, cystic fibrosis, and other lung obstructive diseases.

[0068] In other tissues, there is a vast array of clinical scenarios in which organ-specific AAV variants would be useful. Some examples include AAT deficiency and hepatitis in the liver, Duchenne and limb-girdle muscular dystrophy, sporadic inclusion body myositis, and dysferlin deficiency in the muscle, diabetes mellitus in the pancreas, and recovery from myocardial infarction and heart failure in the heart. Examples also include tissue specific cancer in which gene therapies could be packaged into the AAV variants to deliver anti-angiogenic factors, toxic genes, cytokines, tumor suppressor gene, antigenic vaccines, or antibodies specifically to cancer cells.

[0069] Additionally, the heterologous targeting peptide-modified AAV variants have been characterized on a tissue level in the studies presented herein, their tropism could be further investigated at the cellular level to enable cell-type specific targeting of transgene delivery. This could be of significant importance in an immune setting, for instance, where delivery of key transcription factors to regulatory T cells could provide a new treatment paradigm for autoimmune disorders or delivery of targeting receptors to cytotoxic T cells could transform the field of immuno-oncology. In the brain, using the platform to specifically target microglia could enable novel treatment approaches for diseases such as Alzheimer's and Parkinson's. Furthermore, while the modified AAV vectors presented thus far make use of a single peptide insertion site on the AAV capsid. It is postulated that dual-insertion of an identified peptide at both the “Loop1” and “Loop2” sites could further improve the specificity of transduction.

[0070] Due to the rational design approach of the methodology disclosed herein, the heterologous targeting peptide-modified AAV variants disclosed herein could be broadly utilized for basic research purposes. AAVs do not traditionally transduce cells in culture very effectively, which is especially true for primary cultures. The heterologous targeting peptide-modified AAV variants identified using the methods disclosed herein could enhance transduction and delivery of transgenes, greatly enabling basic research studies which were not previously feasible.

[0071] The heterologous targeting peptide-modified lentivirus variants identified here could be of broad use both clinically and experimentally. Tissue or cell type specific lentiviral particles have many potential applications. Lentiviral particles which can more efficiently transduce immune cells could have great utility for engineering chimeric antigen receptor (CAR) T cells for clinical applications. Additionally, tissue or cell type specific lentiviral particles could have great utility as basic science reagents. For example, being able to transduce a single cell type in a mixed population opens up unique screening avenues for perturbing cells of interest while sparing bystanders. More specifically, modern 3-dimensional tissue culture often makes use of multiple cell types to more accurately model tissue level physiology and architecture. A cell-type specific lentivirus could thus be applied to 3-dimensional tissue models to genetically modify only a subset of the cells which make up the tissue. Beyond the direct applications of engineered lentiviruses, the peptides discovered by this screening methods disclosed herein could also be applied to alternative gene and drug delivery modalities. For example, peptides identified using the methods disclosed herein could be used as targeting ligands for lipid nanoparticles, fused to therapeutic proteins to enable targeted delivery, or even integrated into other viral particles with different wild-type tropism. Targeting of lipid nano-particles is of special interest, due to the similarities between a lipid nanoparticle and the lipid wrapped structure of a lentivirus. Re-targeted lipid nano-particles have immense therapeutic potential, in fields such as vaccine delivery, gene therapy, or targeted imaging.

[0072] As indicated above, any number of virus and viral particles may be coated using the methods disclosed herein, including enveloped viruses, such as retroviruses. In regards to enveloped viruses, the viruses may be first treated to remove the viral envelope, and then coated with membrane fragments using the methods disclosed herein. Examples of method to remove viral envelopes include use of detergents, like triton-X 100, and 3-[(3-cholamidopropyl)dimethylammonio]-1-propanesulfonate (CHAPS); use of alcohols, like ethanol and 2-propanol; heat treatment; and drying.

[0073] The disclosure provides a method for coating a virus or viral particle with membrane fragments comprising one or more of the following steps: lysing cells in a hypotonic solution, which optionally may be combined with Dounce homogenization or sonication, in order to fractionate the cell membrane; removing cells and cell debris by differential centrifugation, leaving a membrane enriched fraction; pelleting and extruding the membrane fragments through polycarbonate membrane(s) to generate purified membrane fragments; coating virus or viral particles by coextruding the virus or viral particles with the purified membrane fragments through polycarbonate membrane(s).

[0074] The cells that are used to generate the membrane fragments disclosed herein, are referred to herein as donor cells. The donor cells are generally eukaryotic in origin and are typically mammalian cells. The donor cells can originate from any number of different types of organisms, including from humans, mice, rats, rabbits, sheep, goats, non-human primates, dogs, etc. Moreover, the methods disclosed herein are not limited to a particular donor cell type, and the membrane fragments can be generated from a variety of different cells types, including, but not limited to, stem cells, progenitor cells, primary cells, somatic cells, germline cells, tumor cells, cell lines, etc. Thus, the methods of the disclosure have general applicability and can be used with different types of cells, from different organisms. Further, the donor cells can be selected so as to generate a coated viruses or viral particle for a specific purpose, for example delivering to a specific cell or tissue type, or improving the efficiency of the therapy.

[0075] The donor cells may be modified such that the membrane fragments generated therefrom further comprise a targeting ligand. Such a targeting ligand may be used to direct the coated viruses or viral particles of the disclosure to specific cells with which they will ultimately fuse. Such a targeting ligand can be produced, for example, by engineering the donor cells to express a cell surface anchoring motif comprising a targeting ligand (e.g., a neuron-specific RVG peptide), or by affixing peptides to membrane proteins via maleimide based linkers. Examples of cell surface anchoring/display motifs include, but are not limited to, outer membrane proteins, lipoproteins, glycosylphosphatidylinositol (GPI) anchoring motifs, and autotranspoters. The targeting ligand can be a member of a specific binding pair. the other of which is found on the target cells (Alvarez-Erviti et al., Nature Biotechnology 29:341-345 (2011)). In one embodiment, the targeting ligand is an antibody or antigen binding fragment thereof (e.g., a single chain antibody (scFV)) that specifically binds a marker present on a cellular target. In another embodiment, the targeting ligand is a short homing peptide. Examples of sequences for short homing peptides include, but are not limited to, ATWLPPR, NGR, CRTLTVRKC, CRKRLDRNC, SPSYVYHQF, SVYDFFVWL, aKXVAAWTLKAAaZC, SFERFEIFPKEC, CRGDKCPDC, KLWVLPKGGGCAm, CSKSSDYQC, hTrail (114-281), TFFYGGSRGKRNNFKTEEY, CGNKRTR, CHVLWSTRC, CDLRSAAVC, cRGFfK, cdG-HoCit-GPQc-Ebes-K-alkyne, HLNILSTLWKYR, cyclic RGD, c(RGDyK), cRGD, c(RGDyK), and GRGDS.

[0076] One of the primary advantages of the coated viruses or viral particles disclosed herein is avoiding immunodetection in a subject. More specifically, the coated virus or viral particles disclosed herein will not be recognized by the human immune system as a pathogen because the outer cell membrane has a human source, containing proteins that prevent neutralization by immune cells.

[0077] Immunity can be broadly defined as all the processes that enable an organism to defend itself against antigens perceived as causing a rupture of homeostatic welfare. Since recombinant AAV vectors do not contain any viral gene, the only sources of foreign antigens brought in during gene transfer are derived from the viral capsid and the transgene product. The nucleic acid contained in the virion may also concur to activate immunity via engagement of Toll-like receptors. The prevalence of total anti-AAV antibodies is close to 70% of the population for AAV1 and AAV2, 45% for AAV6 and AAV9), and 38% for AAV8. Importantly, titers of anti-AAV immunoglobulin G (IgG) antibodies correlate significantly, though not completely, with titers of anti-AAV neutralizing antibodies. Anti-capsid cellular responses are less preponderant than humoral responses. Correlation studies between anti-AAV humoral and cellular responses suggest that there is no link between both parameters, at least for the AAV1 and AAV2 serotypes.

[0078] While rAAV vectors do not encode viral proteins, the viral particles have an identical composition to WT AAV. Therefore, high doses of rAAV vectors can potentially activate recall responses generated against WT AAV capsid following cross-presentation of capsid antigens on target cells. The easiest way to bypass the impact of pre-existing immune responses to AAV would be simply to exclude from clinical trials the subjects exhibiting high amounts of anti-AAV antibodies/neutralizing factors or capsid-reactive T cells. Considering that AAV-seropositive individuals represent up to 70% of the population, exclusion is difficult. Similarly, pre-screening patients to exclude those with pre-existing anti-AAV cellular immunity is not a sound approach, as the frequency of pre-existing circulating AAV-specific T cells in PBMCs is too low to permit their systematic detection through ELISpot or flow cytometry assays. Furthermore, positive anti-capsid cellular responses in clinical trials are not systematically translated into deleterious clinical consequences, and there is currently no means of predicting which parameters will trigger the onset of harmful responses. Importantly, though anti-AAV immune responses can result in loss of transgene expression, they do not inflict other harmful sequelae to the patient and seem to be so far more an “efficiency” than a “safety” issue. The best trade-off one can currently imagine is to engineer rAAV vectors with better transduction efficiency, carrying optimized therapeutic transgenes and with reduced immunogenic profiles. Such vectors would provide a higher therapeutic index, as they would permit therapeutic efficiency at doses sufficient to bypass pre-existing humoral immunity, but not high enough to trigger deleterious cellular immunity.

[0079] Accordingly, the methods of the disclosure can greatly improve the efficacy and safety of current gene therapies, many of which use adeno-associated viruses due to their low pathogenicity and high degree of infectivity. Because AAVs (as well as the vast majority of gene therapy products) do not mediate lifelong transgene expression, there is considerable need for a method to bypass the immune system and enable repeat dosing. Encapsulating the AAV (or other gene therapy vector) in non-immunogenic human cell membranes allows for multiple doses of immunogenic gene therapies to be safely administered to patients. As such, the coated viruses or viral particles provide for a higher therapeutic index than non-coated viruses, and would permit therapeutic efficiency at doses sufficient to bypass pre-existing humoral immunity (e.g., humoral immunity to AAV), but not high enough to trigger deleterious cellular immunity. Further, the coated viruses and viral particles made by the methods disclosed herein can be further modified to provide for targeted delivery by the selection of the specific types of donor cells and/or use of targeting ligands. Additionally, peptide sequences can be added to the viral capsid to improve transduction and inhibit the pathway that presents viral antigens to immune cells (i.e., Major Histocompatibility complex). Such peptide sequences can be identified using the methods described in WO 2018/170015, the disclosure of which is incorporated herein in-full, which describes identifying one or more regions of an AAV capsid protein with affinity for a major histocompatibility complex (MHC), and modifying the one or more regions of the AAV capsid protein with affinity for the MHC through one or more amino acid substitutions, such that the modified region has no affinity for the MHC. Additionally, directed evolution can be used to rapidly engineer viruses or viral particles with desired gene delivery properties, including neutralizing antibody-evasion properties, as well as enhanced gene delivery, gene targeting, and enhanced capacity to infect. Such directed evolution strategies for creating virus variants with improved properties are described in the following references, which disclosure of which are incorporated herein in-full, Asuri et al., Molecular Therapy 20(2):329-338 (2012)); Maheshri et al., Nat Biotechnol 24:198-294 (2006); Koerber et al., Mol Ther 16:1703-1709 (2008); Koerber et al., Mol Ther 17:2088-2095 (2009); Klimczak et al., PLoS One 4:e7467 (2009); Exoffon et al., Proc Natl Acad Sci USA 106:3865-3870 (2009); Li et al., Mol. Ther 17:2067-2077 (2009); and Grimm et al., J Virol 82:5887-5911 (2008)). By preventing the presentation of antigens and/or by improving the evasion properties of the viruses to antibody neutralization, the immune stealth qualities of the coated viruses or viral particles of the disclosure can be improved without having to administer immunosuppressants, which may have deleterious effects.

[0080] The coated viruses and viral particles made by the methods of the disclosure can be used to treat diseases which can be ameliorated by the delivery or the actions of viral gene therapy, or other therapies (e.g., antisense oligonucleotide, small molecule therapeutics, genome engineering, etc.) on the target cells. In one embodiment, the disease involves or is caused by a genetic deficiency in the target cells. The molecule for which they are deficient (or encoding the molecule for which they are deficient) can be delivered to the appropriate cells via the coated viruses or viral particles disclosed herein.

[0081] The disclosure further provides methods of delivering viral gene therapy, or other therapy, to a subject comprising, administering an effective amount of a coated virus or viral particle preparation produced by a method disclosed herein to the subject. The administering can be local or systemic. For example, the coated virus or viral particle preparation disclosed herein may be locally administered to a subject by injection, such as by injection into an organ or a tumor.

[0082] The disclosure also provides methods of delivering a viral gene therapy, or other therapy to a cell, comprising: contacting the cell with an effective amount of a coated virus or viral particle preparation produced by a method disclosed herein that comprises a gene therapy. In one embodiment, the cell is contacted in vivo. In a further embodiment, the cell is contacted within an organ or tumor. In yet a further embodiment, the coated virus or viral particle preparation is produced ex vivo from donor cells of a subject. In an alternate embodiment, the cell is contacted in vitro.

[0083] The disclosure further provides methods of delivering a CRISPR-Cas genome engineering system, or other type of genome engineering system to a cell, comprising: contacting the cell with an effective amount of a coated virus or viral particle preparation produced by a method disclosed herein which comprises a CRISPR-Cas genome engineering system. In one embodiment, the cell is contacted in vivo. In a further embodiment, the cell is contacted within an organ or tumor. In yet a further embodiment, the coated virus or viral particle preparation is produced ex vivo from donor cells of a subject. In an alternate embodiment, the cell is contacted in vitro.

[0084] The disclosure further provides for pharmaceutical compositions, formulations and preparations comprising a coated virus or viral particle described herein for specified modes of administration. In one embodiment, a coated virus or viral particle described herein is an active ingredient in a composition comprising a pharmaceutically acceptable carrier. Such a composition is referred to herein as a pharmaceutical composition. A “pharmaceutically acceptable carrier” means any pharmaceutically acceptable means to mix and/or deliver the targeted delivery composition to a subject. The term “pharmaceutically acceptable carrier” as used herein means a pharmaceutically acceptable material, composition or vehicle, such as a liquid or solid filler, diluent, excipient, solvent or encapsulating material, involved in carrying or transporting the subject agents from one organ, or portion of the body, to another organ, or portion of the body. Each carrier should be “acceptable” in the sense of being compatible with the other ingredients of the composition and is compatible with administration to a subject, for example a human. Such compositions can be specifically formulated for administration via one or more of a number of routes, such as the routes of administration described herein. Supplementary active ingredients also can be incorporated into the compositions. When an agent, formulation or pharmaceutical composition described herein, is administered to a subject, preferably, a therapeutically effective amount is administered. As used herein, the term “therapeutically effective amount” refers to an amount that results in an improvement or remediation of the condition.

[0085] Administration of the pharmaceutical composition to a subject is by means which the coated viruses or virial particle contained therein will contact the target cell. The specific route will depend upon certain variables such as the target cell and can be determined by the skilled practitioner. Suitable methods of administering a coated virus or viral particle described herein to a patient include any route of in vivo administration that is suitable for delivering a coated virus or viral particle to a patient. The preferred routes of administration will be apparent to those of skill in the art, depending on the preparation's type of viral gene therapy being used, the target cell population, and the disease or condition experienced by the subject. Preferred methods of in vivo administration include, but are not limited to, intravenous administration, intraperitoneal administration, intramuscular administration, intracoronary administration, intraarterial administration (e.g., into a carotid artery), subcutaneous administration, transdermal delivery, intratracheal administration, subcutaneous administration, intraarticular administration, intraventricular administration, inhalation (e.g., aerosol), intracerebral, nasal, oral, pulmonary administration, impregnation of a catheter, and direct injection into a tissue. In an embodiment where the target cells are in or near a tumor, a preferred route of administration is by direct injection into the tumor or tissue surrounding the tumor. For example, when the tumor is a breast tumor, the preferred methods of administration include impregnation of a catheter, and direct injection into the tumor.

[0086] Intravenous, intraperitoneal, and intramuscular administrations can be performed using methods standard in the art. Aerosol (inhalation) delivery can also be performed using methods standard in the art (see, for example, Stribling et al., Proc. Natl. Acad. Sci. USA 189: 11277-11281, 1992, which is incorporated herein by reference in its entirety). Oral delivery can be performed by complexing an extracellular vesicle preparation of the present invention to a carrier capable of withstanding degradation by digestive enzymes in the gut of an animal. Examples of such carriers, include plastic capsules or tablets, such as those known in the art.

[0087] One method of local administration is by direct injection. Direct injection techniques are particularly useful for administering the coated virus or viral particle to a cell or tissue that is accessible by surgery, and particularly, on or near the surface of the body. Administration of a composition locally within the area of a target cell refers to injecting the composition centimeters and preferably, millimeters from the target cell or tissue.

[0088] The appropriate dosage and treatment regimen for the methods of treatment described herein will vary with respect to the particular disease being treated, the coated virus or viral particle being delivered, and the specific condition of the subject. The skilled practitioner is to determine the amounts and frequency of administration on a case-by-case basis. In one embodiment, the administration is over a period of time until the desired effect (e.g., reduction in symptoms is achieved). In a certain embodiment, administration is 1, 2, 3, 4, 5, 6, or 7 times per week. In a particular embodiment, administration is over a period of 1, 2, 3, 4, 5, 6, 7, 8, 9, or 10 weeks. In another embodiment, administration is over a period of 2, 3, 4, 5, 6 or more months. In yet another embodiment, treatment is resumed following a period of remission.

[0089] For use in the applications described herein, kits and articles of manufacture are also described herein. Such kits can comprise a carrier, package, or container that is compartmentalized to receive one or more containers such as vials, tubes, and the like, each of the container(s) comprising one of the separate elements to be used in a method described herein. Suitable containers include, for example, bottles, vials, syringes, and test tubes. The containers can be formed from a variety of materials such as glass or plastic.

[0090] For example, the container(s) can comprise one or more agents for coating viruses or viral particles described herein, optionally in a composition or in combination with another agent as disclosed herein. The container(s) optionally have a sterile access port (for example the container can be an intravenous solution bag or a vial having a stopper pierceable by a hypodermic injection needle). Such kits optionally comprise a compound disclosed herein with an identifying description or label or instructions relating to its use in the methods described herein.

[0091] A kit will typically comprise one or more additional containers, each with one or more of various materials (such as reagents, optionally in concentrated form, and/or devices) desirable from a commercial and user standpoint for use of a compound described herein. Non-limiting examples of such materials include, but are not limited to, buffers, diluents, filters, needles, syringes; carrier, package, container, vial and/or tube labels listing contents and/or instructions for use, and package inserts with instructions for use. A set of instructions will also typically be included.

[0092] A label can be on or associated with the container. A label can be on a container when letters, numbers or other characters forming the label are attached, molded or etched into the container itself; a label can be associated with a container when it is present within a receptacle or carrier that also holds the container, e.g., as a package insert. A label can be used to indicate that the contents are to be used for a specific therapeutic application. The label can also indicate directions for use of the contents, such as in the methods described herein. These other therapeutic agents may be used, for example, in the amounts indicated in the Physicians' Desk Reference (PDR) or as otherwise determined by one of ordinary skill in the art.

[0093] The disclosure further provides that the methods and compositions described herein can be further defined by the following aspects (aspects 1 to 87):
[0094] 1. A viral vector having a capsid protein comprising a heterologous targeting peptide in a range of 10-30 amino acids in length.
[0095] 2. The viral vector of aspect 1, wherein the heterologous targeting peptide is about 15-25 amino acids in length.
[0096] 3. The viral vector of aspect 1 or 2, wherein the heterologous targeting peptide is about 20 amino acids in length.
[0097] 4. The viral vector of any one of aspects 1-3, wherein the viral vector is an adeno-associated virus (AAV).
[0098] 5. The viral vector of any one of aspect 1-3, wherein the viral vector is a lentiviral vector.
[0099] 6. The viral vector of any one of aspects 1 to 5, wherein the capsid protein is a VP1 capsid protein.
[0100] 7. The viral vector of any one of aspects 1 to 5, wherein the capsid protein is a VP2 capsid protein.
[0101] 8. The viral vector of any one of aspects 1 to 5, wherein the capsid protein is a VP3 capsid protein.
[0102] 9. The viral vector of any one of any one of aspects 1-4 and 6-8, wherein the heterologous targeting peptide is inserted into an AAV capsid protein at loop 1 and/or loop 2.
[0103] 10. The viral vector of any one of aspects 1-3 or 9, wherein the viral vector is an AAV5.
[0104] 11. The viral vector of any one of aspects 1-4 and 6-9, wherein the viral vector is an AAV9.
[0105] 12. The viral vector of any one of aspects 1-11, wherein the heterologous targeting peptide is flanked by a linker peptide at the N-terminal and C-terminal ends of the heterologous targeting peptide.
[0106] 13. The viral vector of any one of aspects 1-11, wherein the heterologous targeting peptide is not flanked by a linker peptide at the N-terminal and C-terminal ends of the heterologous targeting peptide.
[0107] 14. The viral vector of any one of aspects 1-13, wherein the heterologous targeting peptide targets the viral vector to hepatocytes or liver tissue.
[0108] 15. The viral vector of any one of aspects 1-13, wherein the heterologous targeting peptide targets the viral vector to neuronal cells or brain tissue.
[0109] 16. The viral vector of any one of aspects 1-13, wherein the heterologous targeting peptide targets the viral vector to pancreatic cells or pancreas tissue.
[0110] 17. The viral vector of any one of aspects 1-13, wherein the heterologous targeting peptide targets the viral vector to cardiac cells or heart tissue.
[0111] 18. The viral vector of any one of aspects 1-13, wherein the heterologous targeting peptide targets the viral vector to lung tissue.
[0112] 19. The viral vector of any one of aspects 1-13, wherein the heterologous targeting peptide targets the viral vector to intestinal tissue.
[0113] 20. The viral vector of any one of aspects 1-13, wherein the heterologous targeting peptide targets the viral vector to spleen tissue.
[0114] 21. The viral vector of any one of aspects 1-13, wherein the heterologous targeting peptide targets the viral vector to renal cells or kidney tissue.
[0115] 22. The viral vector of any one of aspects 1-13, wherein the heterologous targeting peptide targets the viral vector to muscle cells or tissue.
[0116] 23. An adeno-associated virus (AAV) capsid protein comprising a heterologous targeting peptide cloned into loop 1 and/or loop 2 of the capsid protein, wherein the heterologous targeting peptide is about 10-30 amino acids in length.
[0117] 24. The AAV capsid protein of aspect 23, wherein the capsid protein is a VP1 capsid protein.
[0118] 25. The AAV capsid protein of aspect 23, wherein the capsid protein is a VP2 capsid protein.
[0119] 26. The AAV capsid protein of aspect 23, wherein the capsid protein is a VP3 capsid protein.
[0120] 27. The AAV capsid protein of aspect 23 to 26, wherein the heterologous targeting peptide is about 15-25 amino acids in length.
[0121] 28. The AAV capsid protein of any one of aspects 23 to 27, wherein the heterologous targeting peptide is about 20 amino acids in length.
[0122] 29. The AAV capsid protein of any one of aspects 23 to 28, wherein the heterologous targeting peptide is flanked by a linker peptide at the N-terminal and C-terminal ends of the heterologous targeting peptide.
[0123] 30. The AAV capsid protein of any one of aspects 23 to 29, wherein the heterologous targeting peptide targets hepatocytes or liver tissue.
[0124] 31. The AAV capsid protein of any one of aspects 23 to 29, wherein the heterologous targeting peptide targets neuronal cells or brain tissue.
[0125] 32. The AAV capsid protein of any one of aspects 23 to 29, wherein the heterologous targeting peptide targets pancreatic cells or pancreas tissue.
[0126] 33. The AAV capsid protein of any one of aspects 23 to 29, wherein the heterologous targeting peptide targets cardiac cells or heart tissue.
[0127] 34. The AAV capsid protein of any one of aspects 23 to 29, wherein the heterologous targeting peptide targets lung tissue.
[0128] 35. The AAV capsid protein of any one of aspects 23 to 29, wherein the heterologous targeting peptide targets intestinal tissue.
[0129] 36. The AAV capsid protein of any one of aspects 23 to 29, wherein the heterologous targeting peptide targets spleen tissue.
[0130] 37. The AAV capsid protein of any one of aspects 23 to 29, wherein the heterologous targeting peptide targets renal cells or kidney tissue.
[0131] 38. The AAV capsid protein of any one of aspects 23 to 29, wherein the heterologous targeting peptide targets muscle cells or tissue.
[0132] 39. A recombinant AAV (rAAV) comprising a capsid protein of any one of aspects 23-38.
[0133] 40. A recombinant AAV (rAAV) comprising a capsid protein having a targeting peptide in loop 1 and/or loop 2 wherein the targeting peptide is independently selected from SEQ ID Nos:5865 to 11445.
[0134] 41. The recombinant AAV of aspect 40, wherein the recombinant AAV further comprises a heterologous polynucleotide for gene delivery.
[0135] 42. The recombinant AAV of aspect 41, wherein the heterologous polynucleotide is a therapeutic gene.
[0136] 43. A composition comprising the recombinant rAAV of any one of aspects 40-42.
[0137] 44. The composition of aspect 43 further comprising a pharmaceutically acceptable carrier.
[0138] 45. A method for delivering a transgene to a subject comprising:
   [0139] administering a recombinant AAV (rAAV) to a subject, wherein the rAAV comprises:
      [0140] (i) a capsid protein of any one of aspects 23-38, and
      [0141] (ii) at least one transgene, and wherein the rAAV infects cells of a target tissue of the subject.
[0142] 46. The method of aspect 45, wherein the at least one transgene encodes a protein.
[0143] 47. The method of aspect 46, wherein the protein is an immunoglobulin heavy chain or light chain or fragment thereof.
[0144] 48. The method of aspect 45, wherein the at least one transgene encodes a small interfering nucleic acid.
[0145] 49. The method of aspect 48, wherein the small interfering nucleic acid is a miRNA.
[0146] 50. The method of aspect 48, wherein the small interfering nucleic acid is a miRNA sponge or TuD RNA that inhibits the activity of at least one miRNA in the subject or animal.
[0147] 51. The method of aspect 49, wherein the miRNA is expressed in a cell of the target tissue.
[0148] 52. The method of aspect 45, wherein the target tissue is skeletal muscle, heart, liver, pancreas, brain or lung.
[0149] 53. The method of aspect 45, wherein the transgene expresses a transcript that comprises at least one binding site for a miRNA, wherein the miRNA inhibits activity of the transgene, in a tissue other than the target tissue, by hybridizing to the binding site.
[0150] 54. The method of aspect 45, wherein the at least one transgene encodes a gene product that mediates genome editing.
[0151] 55. The method of aspect 45, wherein the transgene comprises a tissue specific promoter or inducible promoter.
[0152] 56. The method of aspect 55, wherein the tissue specific promoter is a liver-specific thyroxin binding globulin (TBG) promoter, an insulin promoter, a glucagon promoter, a somatostatin promoter, a pancreatic polypeptide (PPY) promoter, a synapsin-1 (Syn) promoter, a creatine kinase (MCK) promoter, a mammalian desmin (DES) promoter, a a-myosin heavy chain (a-MHC) promoter, or a cardiac Troponin T (cTnT) promoter.
[0153] 57. The method of any one of aspects 45 to 56, wherein the rAAV is administered intravenously, intravascularly, transdermally, intraocularly, intrathecally, orally, intramuscularly, subcutaneously, intranasally, or by inhalation.
[0154] 58. The method of any one of aspects 45 to 57, wherein the subject is selected from a mouse, a rat, a rabbit, a dog, a cat, a sheep, a pig, and a non-human primate.
[0155] 59. The method of any one of aspects 45 to 57, wherein the subject is a human.
[0156] 60. An isolated nucleic acid encoding an AAV capsid protein containing an amino acid sequence selected from the group consisting of SEQ ID No:5865 to 11444 and 11445.
[0157] 61. A composition comprising the isolated AAV capsid protein of any one of aspects 23 to 38.
[0158] 62. The composition of aspect 61 further comprising a pharmaceutically acceptable carrier.
[0159] 63. A kit for producing a rAAV, the kit comprising: a container housing an isolated nucleic acid of aspect 60.
[0160] 64. The kit of aspect 63 further comprising instructions for producing the rAAV.
[0161] 65. The kit of aspect 63 or aspect 64, further comprising at least one container housing a recombinant AAV vector, wherein the recombinant AAV vector comprises a transgene.
[0162] 66. A method for coating a virus or viral particle with membrane fragments comprising:
   [0163] lysing donor cells in a hypotonic solution, which optionally may be combined with Dounce homogenization or sonication, in order to fractionate the cell membrane;
   [0164] removing cells and cell debris by one or more rounds of centrifugation, leaving a membrane enriched fraction;
   [0165] extruding the membrane enriched faction through polycarbonate membrane(s) to generate purified membrane fragments; and
   [0166] coating virus or viral particles by coextruding the virus or viral particles with the purified membrane fragments through polycarbonate membrane(s).
[0167] 67. The method of aspect 66, wherein the viruses or viral particles are non-enveloped viruses or viral particles.
[0168] 68. The method of aspect 66, wherein the viruses or viral particles are enveloped viruses or viral particles which have had their viral envelope removed.
[0169] 69. The method of any one of aspects 66-68, wherein the viruses or viral particles are selected from retroviruses, adenovirus, adeno-associated virus, hybrid adenoviruses, alphavirus, herpes simplex virus, poxvirus, Epstein-Barr virus and lentivirus.
[0170] 70. The method of aspect 69, wherein the viruses or viral particles are adeno-associated viruses (AAV).
[0171] 71. The method of any one of aspects 66-70, wherein the viruses or viral particles have been modified by directed evolution to have increased neutralizing antibody-evasion properties, as well as enhanced gene delivery, gene targeting, and/or enhanced capacity to infect.
[0172] 72. The method of any one of aspects 66-71, wherein the viruses or viral particles have been modified by one or more amino acid substitutions in one or more regions of a viral capsid protein so as to reduce the affinity of the viral capsid protein for the major histocompatibility complex.
[0173] 73. The method of any one of aspects 66-71, wherein the donor cells are mammalian cells.
[0174] 74. The method of aspect 73, wherein the donor cells are human cells.
[0175] 75. The method of aspect 74, where the donor cells are human stem cells, human progenitor cells, human primary cells, human somatic cells, human germline cells, or human tumor cells.
[0176] 76. The method of any one of aspects 66-75, wherein the membranes of the donor cells have been modified to express or present a targeting ligand.
[0177] 77. The method of aspect 76, wherein the targeting ligand is used to improve entry of the coated viruses or viral particles into target cells, inhibit components of the immune response to the coated viruses or viral particles, or to target the coated viruses or viral particles to certain cell types or organs.
[0178] 78. The method of aspect 76 or aspect 77, wherein the targeting ligand is a peptide, antibody or antibody fragment.
[0179] 79. The method of aspect 78, wherein the targeting ligand comprises a peptide of any one of SEQ ID Nos:5865 to 11445.
[0180] 80. Coated viruses or viral particles made by the method of any one of aspects 66-79.
[0181] 81. The coated viruses or viral particles of aspect 80, wherein the coated viruses or viral particles have been modified to comprise a targeting ligand.
[0182] 82. The coated viruses or viral particles of aspect 81, wherein the coated viruses or viral particles are used to deliver transgene(s) into target cells.
[0183] 83. The coated viruses or viral particles of aspect 81 or aspect 82, wherein the coated viruses or viral particles are used to genome engineer target cells.
[0184] 84. A pharmaceutical composition comprising the coated viruses or viral particles of any one of aspect 80 to 83 and a pharmaceutically acceptable carrier, diluent, binder and/or filler.
[0185] 85. A method of treating a subject suffering from a disease or disorder in need of treatment thereof, comprising administering the coated viruses or viral particles of any one of aspects 80 to 83, or the pharmaceutical composition of aspect 84.
[0186] 86. An engineered viral particle comprising an artificially prepared lipid envelope.
[0187] 87. A method of preparing an engineered retroviral particle, the method comprising treating a retroviral particle with a detergent to remove a lipid envelop to obtain naked retroviral particles, isolating the naked retroviral particles and co-extruding a lipid envelop with the naked retroviral particles to obtain an engineered retroviral particle.

[0188] The following examples are intended to illustrate but not limit the disclosure. While they are typical of those that might be used, other procedures known to those skilled in the art may alternatively be used.

### EXAMPLES

[0189] Protocol for producing membrane bound AAVs: Adherent cells are grown to at least 70% confluency. The cells are detached by using 0.05% trypsin, pelleted by centrifuging at 500×g, and washed with PBS (×3). The cells are taken up in hypotonic lysis buffer: 0.2 mM EDTA in ddH₂O+protease inhibitor (1 mini tablet for a 10 mL solution). The suspension is then adjusted with 1× PBS and DNase is added. The lysed cells are then centrifuged at 18,000×g for 7 mins, the supernatant is removed, and the pelleted material is re-suspended in FBS (7×). After washing the pelleted material in 10 mM Tris-HCl+0.2 mM EDTA, the pelleted material is resuspended in ddH₂O and sonicated briefly (a few seconds). A series of extrusions are then performed using 400 nm, 200 nm, 100nm, and then 50 nm polycarbonate membranes to purify the membrane fragments. The resulting membrane fragments were then coated onto AAVs by co-extruding the membrane fragments and AAVs using 200 nm, 100 nm, and then 50 nm polycarbonate membranes. The coated AAVs are then centrifuged at 18,000×g for 10 mins in order to isolate membrane coated AAVs from empty membranes.

[0190] Alternate Protocol for Coating AAVs: The method used to lyse cells and create membrane fragments is based upon the methods described in Fang et al. (Nano Letters 14(4):2181-2188 (2014)). Briefly, the cells are placed in a hypotonic solution (consisting of 20 mM Tris-HCl pH=7.5 (Mediatech), 10 mM KCl (Sigma Aldrich), 2 mM MgCl₂ (Sigma Aldrich), and 1 EDTA-free mini protease inhibitor tablet (Pierce) per 10 mL of solution. Dounce homogenization with a tight-fitting pestle or sonication can also be used to disrupt and fractionate the cell membrane. Once the cells have lysed, the cell contents are removed by centrifugation (e.g., centrifuging at 20,000×g). The pelleted material is discarded and the supernatant is centrifuged at 100,000×g and the pellet containing the plasma membrane material is collected. The pelleted membranes are washed once with 10 mM Tris-HCl pH=7.5 and 1 mM EDTA, and then physically serially extruded through a 400 nm, 200 nm, 100 nm and 50 nm polycarbonate membrane. The resulting membrane fragments were then coated onto AAVs by co-extruding the membrane fragments and AAVs were coextruded through a 50 nm polycarbonate membrane.

[0191] Determining AAVs are coated with membranes using transmission electron microscopy (TEM). Purified membranes are characterized by using transmission electron microscopy (TEM) by negatively staining with uranyl acetate. Briefly, a drop of membrane solution (at 1 mg/mL) is deposited onto glow-discharged carbon-coated grid; after 5 minutes, the grid is rinsed with 10 drops deionized water; and then 1% uranyl acetate (3 drops) is added to negatively stain membrane particles. The same TEM procedure is then performed with the sample containing AAV and membrane fragments to confirm presence of membrane bound AAVs. Additionally, a control sample of PEG coated AAV can be used. Whereby, the same sizing protocol is used with PEG coated AAVs and AAVs. A Coulter Counter can be further used to measure size of particles.

[0192] Fluorescence Quenching Test: The donor cells are linked to a fluorescent probe via a NHS-PEG(2)-maleimide linker. The NHS-PEG(2)-maleimide linker reacts to amine groups of membrane proteins of the donor cells, and also reacts with the probe's thiol group, thereby linking the probe to membrane proteins of the donor cells. The fluorescent probe has the general structure of:

[chemical structure]

whereby, the 3′ end of the probe has a disulfide attached to the single stranded DNA probe, with the fluorescent dye 6-FAM at the 5′ end. The fluorescent probe is the quenched using a quencher that is attached to a complementary ssDNA sequence.

[0193] Determining the protein composition of the membrane: A bicinchoninic acid assay (BCA assay) is first performed in order to get all samples to the same protein concentration of 1 mg/mL in loading buffer (lithium dodecyl sulfate). The samples are heated at 70° C. for 10 mins. 20 uL of samples are loaded into each well of a 4-12% Bis-Tris (buffering agent) 10-well minigel in MOPS running buffer. The gel is then stained with Coomassie blue, and washed by keeping the stained gel in water over night. The washed gel is then imaged to give a general protein profile, and is further compared with a stained gel from the donor cell type. The gel is then transferred to nitrocellulose membrane and western blot is performed for the specific markers using horseradish peroxidase (HRP)-conjugated anti-mouse IgG or anti-rabbit IgG antibodies to Pan-cadherin (membrane marker), Na/K ATPase (membrane pump), CD47 (membrane marker), Histone H3 (nucleus), Cytochrome c oxidase (mitochondria), and GAPDH (cytosol). For controls, antibodies for markers specific to the donor cells are used; and the protein composition to empty membrane vesicles from the donor cells is evaluated.

[0194] Elimination half-life of coated AAVs in serum: For membrane-coated AAVs, the stability of the AAVs in serum is evaluated in serum over several hours (AAVs are suspended in 100% FBS and the absorbance is measured with a microplate reader over several hours), and are compared with uncoated AAVs and PEG coated AAVs.

[0195] Long term storage of Coated AAVs: The coated AAVs are lyophilized in 5 wt % sucrose, then reconstituted with water. The sizes of the coated AAVs prior to lyophilization and reconstitution are then compared. The coated AAVs can be further compared to uncoated AAVs and PEG coated AAVs.

[0196] Integrity of the membrane after cellular uptake: The viral capsid is tagged with red fluorescent dye; the membrane proteins are tagged with green fluorescent dye. Whether the membrane-bound AAV is fusogenic is determined based upon colocalization of the signals (i.e., overlapping fluorescent signals).

[0197] Engineered AAV design: To engineer rationally designed AAV capsids for improved in vivo efficacy and organ specificity, the AAV5 and AAV9 capsids were first modified with peptide insertions at two distinct sites in each serotype. To determine the insertion sites in each of these capsids, amino acid sites at the top of AAV variable regions (e.g., AAV9 VR-VII) were first located within the loop that protrudes from the capsid surface and are important to AAV-cell interactions. For suitable locations for peptide library insertion (see FIG. 6A), positions N443 (AAV5-Loop1) and S576 (AAV5-Loop2) were identified for AAV5, and positions Q456 (AAV9-Loop1) and A587 (AAV9-Loop2) were identified for AAV9. These sites have been linked to the endogenous binding sites of AAV5 to α2-3 N-linked sialic acid and platelet derived growth factor receptor and of AAV9 to galactose and the 37/67 kDa laminin receptor. Accordingly, disruption of these regions via library insertion most likely will inhibit wild-type receptor-mediated cellular interactions. To ensure proper folding and presentation of the peptide library, the peptide was flanked with a 2 amino acid sequence containing a small Glycine-Serine (GS) flexible linker. However, it was further proposed that AAV variants could be engineered with alternative linkers such as longer flexible linkers (e.g., Gly₈) or more rigid linkers (e.g., [EAAAK]₃).

[0198] Next. to efficiently clone in the ligand library, a ligation-based approach was utilized with Type IIS restriction enzymes. For this, cloning vectors were created for each of the 4 serotypes in which the target insertion site was modified to contain the flanking GS residues with the PaqCI type IIS recognition sites on either end of an ˜60 base-pair filler DNA sequence. Upon treatment with the PaqCI restriction enzyme, the filler DNA is excised leaving sticky end overhangs which are complementary to the sticky ends generated by PaqCI treatment of the peptide library (see FIG. 6B). These two components can then be ligated together to obtain a plasmid pool which has the peptide library cloned into specific regions of the AAV capsid gene. Through next generation sequencing of this plasmid pool, it was found that greater than 98% of all peptides present in the originally designed library were successfully cloned into each AAV capsid gene using this cloning approach (see FIG. 7A-D).

[0199] Furthermore, while the initial screening pool of modified capsids was composed of AAV5 and AAV9 capsids, this approach could be applied to further engineer a broad range of AAV serotypes. This includes, but is not limited to, wild-type AAV serotypes such as AAV1-5 and AAV7-9. as well as the over 100 AAV variants which have been identified in human and non-human primate tissues. Additionally, this approach could be applied to pseudotyped AAV vectors which comprise mixed capsids and genomes from different AAV serotypes, as well as previously engineered AAV variants such as AAV-PHP.eB with improved transduction of neurons and glia in the central nervous system, AAV-PHP.S with improved tropism for neurons within the peripheral nervous system, and AAV-DJ which specializes in highly efficient gene transfer in vivo. Finally, while the initial screen was performed with AAV capsids encapsulating a linear single-stranded DNA genome, this approach could be utilized with self-complementary AAV (scAAV) genomes to enable differing gene expression dynamics in vivo.

[0200] Design of displayed peptide library: Each AAV library consisted of 275,298 peptides, derived from 6,465 proteins. These protein sources were mined from a variety of protein families, including all protein ligands cataloged in the Guide to Pharmacology database (Harding et al. 2018), toxins, nuclear localization signals (NLS), viral receptor binding domains, albumin and Fc binding domains, transmembrane domains, histones, granzymes, and predicted cell penetrating motifs (see FIG. 5). In addition to peptides coding for functional biomolecules, 444 control peptides coding for FLAG-tags with premature stop codons were also included. Because the constructs introduce a stop-codon in the AAV capsids, none of them should successfully package or transduce cells in vivo.

[0201] Method for identifying infective AAV variants: Utilizing the plasmid pool described above, AAV capsids were generated by transfecting HEK293T cells with the plasmid library pool and an adenoviral helper plasmid at a ratio to prevent capsid cross-packaging. AAVs were purified via iodixanol gradient ultracentrifugation and a subset of the capsids were subjected to next generation sequencing to determine which peptide inserts were successfully packaged. Greater than 80% of the starting peptide pool was identified across all the serotypes (see FIG. 7A-D).

[0202] Each AAV capsid pool was then diluted to administer a final viral dose of 0.5E12 viral genomes/mouse for AAV5 libraries, and 1E12 viral genomes/mouse for AAV9) libraries. AAV libraries were delivered via retro-orbital injections to two mice for each AAV serotype library. Following a two-week transduction period in vivo the liver, brain, skeletal muscle, large intestine, spleen, kidney, lungs, heart, and pancreas were collected from each mouse. DNA was isolated from each tissue using TriZol extraction and the region of the AAV capsid containing the peptide insert was selectively PCR-amplified and prepared for next generation sequencing (e.g., see FIG. 5). Once sequenced, the total count of each peptide was quantified across all organs for each serotype and normalized relative to the average read depth of all the samples.

[0203] To analyze the top transducing AAV variants in each organ, the log2(fold-change) (log2FC) value was then calculated for each organ and then compared to the count of that AAV variant in the capsid pool along with a significance value calculated using a one-sample t-test (see FIG. 8A). It was found in all organs that over 17,000 AAV variants which have an FDR adjusted p-value<0.05 and a log2FC greater than 1. As expected, many of the significant hits targeted the liver, and surprisingly, several hits appear to transduce all tissues (see FIG. 8A). To identify the absolute top performing AAV variants, a series of filtering steps were devised to stratifs variants. First, the Levenshtein distance was calculated between ‘hit’ peptides to identify motifs that are consistently able to successfully transduce in vivo (see FIG. 8A). To filter the ˜18.000 initial hits, only ‘hit’ peptides were considered where a similar (>50% sequence homology) peptide was detected among the hit pool. The goal of this filtering is to ensure that the ‘hit’ peptide motifs are internally reproducible Second, to ensure that the high increase in counts across organs was due to a strong transduction capability rather than low count values in the capsid pool, out all AAV variants were filtered out with a log2count value less than 3 in the capsid pool. Finally, a log2FC derived Z-score was calculated for each organ sample, to rank how each peptide performs relative to all others in a particular organ. Peptides were only considered with a Z-score>2.5 in at least one organ. The filtering process resulted in a list of 400 top performing displayed-peptides across the four AAV capsids/loops. Log2FC values for these top performing hits are shown in FIG. 8B-E.

[0204] A subset of 112 AAV additional variants which appear to be strong transducers across organs were also identified (see FIG. 9A). These additional variants were identified by taking the average transduction level across all organs, and ranking the AAV variants on this metric.

[0205] Engineered lentiviral design: In addition to screening engineered AAVs, this methodology was adapted to engineering peptide-decorated lentiviral particles. To display peptides on lentiviral particles, a plasmid was built which contains the expression machinery to constitutively express peptides tethered to an ICAM1 transmembrane domain, which has previously been shown to associate with budding lentiviral particles (see FIG. 10A). An identical library of peptides as in the AAV screens was then cloned into this lentiviral display backbone. The library plasmid also contained a puromycin resistance gene, which could be used to select successfully infected cells via the addition of puromycin to the cell culture media. This plasmid library of peptides was used, along with a double mutant VSVG plasmid (K47Q and R354Q), to produce a library of lentiviral particles in HEK293T cells (see FIG. 10B). The double mutant VSVG retains the ability to promote fusion of the lentiviral particles to the target cells, but is devoid of native receptor binding capabilities. For lentiviral production, cells were transfected with a 1:100 dilution of the transfer vector to prevent cross-packaging of peptide genomes to the incorrect lentiviral particle.

[0206] Method for identifying infective lentiviral variants: To identify cell type specific lentiviral variants, five cell lines were subjected to targeted transduction using the library of peptide-displaying lentiviral particles (see FIG. 10C). These cells were chosen to span a variety of tissue types, with the goal of identifying tissue specific lentiviral particles. The cells were transduced overnight in complete DMEM media, and changed to puromycin containing media after 48 h. After 3 days of selection in puromycin containing media, genomic DNA was isolated from the surviving cells via a Qiagen DNeasy genomic DNA isolation kit. Genomic DNA was then used as a template for PCR reactions (5 μg gDNA/100 μl PCR reaction) to amplify the integrated DNA coding for the displayed peptides. A second PCR was then performed to attach indices and prep the samples for sequencing on an Illumina NovaSeq. Deep sequencing was then performed to identify peptide variants which promote infection of each of the above-mentioned cell types.

[0207] It will be understood that various modifications may be made without departing from the spirit and scope of this disclosure. Accordingly, other embodiments are within the scope of the following claims.

The application's sequence listing, which the Patent Office published only in electronic form, follows.

SEQUENCE LISTING (12096 sequences)

SEQ ID NO: 1 - DNA, 60 bp, Artificial Sequence
  Description of Artificial Sequence: targeting sequence/synthetic sequence
gaggcggccgcctcccagcgcagctcatccctggcttccaacaggctgaagattgccctg

SEQ ID NO: 2 - DNA, 60 bp, Artificial Sequence
  Description of Artificial Sequence: targeting sequence/synthetic sequence
cgttcttctttgggctataagaaggcagaggatgagatgtcccgggccacgtctgttgga

SEQ ID NO: 3 - DNA, 60 bp, Artificial Sequence
  Description of Artificial Sequence: targeting sequence/synthetic sequence
ctggccggccagagacaggggactcaggcggaatccaacctgagtagtaaattccagttt

SEQ ID NO: 4 - DNA, 60 bp, Artificial Sequence
  Description of Artificial Sequence: targeting sequence/synthetic sequence
ttcatcttcaagttcaacgagaccgcccccgtgcccaccatcccccctctggacaccaag

SEQ ID NO: 5 - DNA, 60 bp, Artificial Sequence
  Description of Artificial Sequence: targeting sequence/synthetic sequence
ggcgtgcacgccaagagctccgactggggcctgcaggccggctacatccccgtgaacccc

SEQ ID NO: 6 - DNA, 60 bp, Artificial Sequence
  Description of Artificial Sequence: targeting sequence/synthetic sequence
gttgtttatactggacacgacaccaaactcatgcagaattcaaccaaagcgcctctcaag

SEQ ID NO: 7 - DNA, 60 bp, Artificial Sequence
  Description of Artificial Sequence: targeting sequence/synthetic sequence
cgtttctctgttgttatgtctgaaaccgtgcctgcagcttctgccagtgctggtgtagcc

SEQ ID NO: 8 - DNA, 60 bp, Artificial Sequence
  Description of Artificial Sequence: targeting sequence/synthetic sequence
gtgaagatccagcgggtgaacaatagctccaccaacgacaacctggtgcggaagaacgac

SEQ ID NO: 9 - DNA, 60 bp, Artificial Sequence
  Description of Artificial Sequence: targeting sequence/synthetic sequence
cacgacaccaaactcatgcagaattcaaccaaagcgcctctcaagagatcaaatgttgag

SEQ ID NO: 10 - DNA, 60 bp, Artificial Sequence
  Description of Artificial Sequence: targeting sequence/synthetic sequence
aagaccccactaaccgccaacatcacaaaatccggaaacacattccggcccgaggtccac

SEQ ID NO: 11 - DNA, 60 bp, Artificial Sequence
  Description of Artificial Sequence: targeting sequence/synthetic sequence
gccctgggcgtggccaccgccgctgccgtgaccgccggcgtggccatcgccaagaccatc

SEQ ID NO: 12 - DNA, 60 bp, Artificial Sequence
  Description of Artificial Sequence: targeting sequence/synthetic sequence
cccggcatgaccaaccaggacaacaagatcgtggtcaagaacgccaccaagagcaacgtg

SEQ ID NO: 13 - DNA, 60 bp, Artificial Sequence
  Description of Artificial Sequence: targeting sequence/synthetic sequence
ttgaagaccccactaaccgccaacatcacaaaatccggaaacacattccggcccgaggtc

SEQ ID NO: 14 - DNA, 60 bp, Artificial Sequence
  Description of Artificial Sequence: targeting sequence/synthetic sequence
caaaacttgtcgctgcccaatagcacggcccaagcactcttggccgcccgtgtggacccg

SEQ ID NO: 15 - DNA, 60 bp, Artificial Sequence
  Description of Artificial Sequence: targeting sequence/synthetic sequence
gataaacgcagaaatggacctgaattttccaatgacatcaagaaaaggaaggtggatgat

SEQ ID NO: 16 - DNA, 60 bp, Artificial Sequence
  Description of Artificial Sequence: targeting sequence/synthetic sequence
gagaacggcggcgccagactggccgagtaccacgccaaggccaccgagcatctgagcacg

SEQ ID NO: 17 - DNA, 60 bp, Artificial Sequence
  Description of Artificial Sequence: targeting sequence/synthetic sequence
gagcagctgggaggcactgtcaccaaccccgggggctcggggacctccagccggctggag

SEQ ID NO: 18 - DNA, 60 bp, Artificial Sequence
  Description of Artificial Sequence: targeting sequence/synthetic sequence
tcaaaactgtataaggaggctgaaaagataaaaaaatggaaagtaagtacagaagctgaa

SEQ ID NO: 19 - DNA, 60 bp, Artificial Sequence
  Description of Artificial Sequence: targeting sequence/synthetic sequence
cttaaagcatccagcacaatggcaaagtcagagaacttggtgaagagccatgtccagctg

SEQ ID NO: 20 - DNA, 60 bp, Artificial Sequence
  Description of Artificial Sequence: targeting sequence/synthetic sequence
atatcaagtgactccaacaacctaaaactcaacaacgtgcgcctgccacgggagaacatg

SEQ ID NO: 21 - DNA, 60 bp, Artificial Sequence
  Description of Artificial Sequence: targeting sequence/synthetic sequence
ggcagggcgagagcattaaatgaaagcaaaagagttaataatggcaacacggctccagaa

SEQ ID NO: 22 - DNA, 60 bp, Artificial Sequence
  Description of Artificial Sequence: targeting sequence/synthetic sequence
gagttgaagaccccactaaccgccaacatcacaaaatccggaaacacattccggcccgag

SEQ ID NO: 23 - DNA, 60 bp, Artificial Sequence
  Description of Artificial Sequence: targeting sequence/synthetic sequence
cgcatcagtaaagaaattctcacccaaggacaaataaatagcacttcaggacttaataag

SEQ ID NO: 24 - DNA, 60 bp, Artificial Sequence
  Description of Artificial Sequence: targeting sequence/synthetic sequence
agaaatggacctgaattttccaatgacatcaagaaaaggaaggtggatgataaggactcc

SEQ ID NO: 25 - DNA, 60 bp, Artificial Sequence
  Description of Artificial Sequence: targeting sequence/synthetic sequence
ttgctccgcaagggcaactattcggagcgcgtgggcgccggcgccccggtctatctggcc

SEQ ID NO: 26 - DNA, 60 bp, Artificial Sequence
  Description of Artificial Sequence: targeting sequence/synthetic sequence
atcctggaggtttccagcttgccgacaaccaactcaacaaccaattcagccaccaaaata

SEQ ID NO: 27 - DNA, 60 bp, Artificial Sequence
  Description of Artificial Sequence: targeting sequence/synthetic sequence
gacagcttcgtgatccggggcgacgaggtgcggcagatcgcccccggccagaccggcaag

SEQ ID NO: 28 - DNA, 60 bp, Artificial Sequence
  Description of Artificial Sequence: targeting sequence/synthetic sequence
cgttcttttcactctggtggatatggccaggatgccttgggtatggaccccatgatggaa

SEQ ID NO: 29 - DNA, 60 bp, Artificial Sequence
  Description of Artificial Sequence: targeting sequence/synthetic sequence
aggacttctggattgttggagacaaacttcactgcctcagccagaactactggctctggg

SEQ ID NO: 30 - DNA, 60 bp, Artificial Sequence
  Description of Artificial Sequence: targeting sequence/synthetic sequence
aaagcatccagcacaatggcaaagtcagagaacttggtgaagagccatgtccagctgcaa

SEQ ID NO: 31 - DNA, 60 bp, Artificial Sequence
  Description of Artificial Sequence: targeting sequence/synthetic sequence
aaggagaacggcggcgccagactggccgagtaccacgccaaggccaccgagcatctgagc

SEQ ID NO: 32 - DNA, 60 bp, Artificial Sequence
  Description of Artificial Sequence: targeting sequence/synthetic sequence
tctgccctggccggccagagacaggggactcaggcggaatccaacctgagtagtaaattc

SEQ ID NO: 33 - DNA, 60 bp, Artificial Sequence
  Description of Artificial Sequence: targeting sequence/synthetic sequence
cctgaattttccaatgacatcaagaaaaggaaggtggatgataaggactccagccactat

SEQ ID NO: 34 - DNA, 60 bp, Artificial Sequence
  Description of Artificial Sequence: targeting sequence/synthetic sequence
atagttgtttatactggacacgacaccaaactcatgcagaattcaaccaaagcgcctctc

SEQ ID NO: 35 - DNA, 60 bp, Artificial Sequence
  Description of Artificial Sequence: targeting sequence/synthetic sequence
gaattttccaatgacatcaagaaaaggaaggtggatgataaggactccagccactatgac

SEQ ID NO: 36 - DNA, 60 bp, Artificial Sequence
  Description of Artificial Sequence: targeting sequence/synthetic sequence
tatggccaggacaacacatgtgaggagtaccacacagtggggccccactcctgccacatc

SEQ ID NO: 37 - DNA, 60 bp, Artificial Sequence
  Description of Artificial Sequence: targeting sequence/synthetic sequence
ggacctgaattttccaatgacatcaagaaaaggaaggtggatgataaggactccagccac

SEQ ID NO: 38 - DNA, 60 bp, Artificial Sequence
  Description of Artificial Sequence: targeting sequence/synthetic sequence
caccccgagttgaagaccccactaaccgccaacatcacaaaatccggaaacacattccgg

SEQ ID NO: 39 - DNA, 60 bp, Artificial Sequence
  Description of Artificial Sequence: targeting sequence/synthetic sequence
ctgggcgtgctgagcgccgctggcagcaccatgggcgccgctgccaccacactggccgtg

SEQ ID NO: 40 - DNA, 60 bp, Artificial Sequence
  Description of Artificial Sequence: targeting sequence/synthetic sequence
gctgcccaccccgagttgaagaccccactaaccgccaacatcacaaaatccggaaacaca

SEQ ID NO: 41 - DNA, 60 bp, Artificial Sequence
  Description of Artificial Sequence: targeting sequence/synthetic sequence
gccggcggctccagctccaacagcacccgagagccgcccgcctcgggtcgggtggcgttg

SEQ ID NO: 42 - DNA, 60 bp, Artificial Sequence
  Description of Artificial Sequence: targeting sequence/synthetic sequence
gtggtcctggccaacgccagccggatccactacgacggcggagccggcaccaacaccgtg

SEQ ID NO: 43 - DNA, 60 bp, Artificial Sequence
  Description of Artificial Sequence: targeting sequence/synthetic sequence
cgcttacaactggatgcactgcagcgtggtaagggcctgagccatggggtcccggaacac

SEQ ID NO: 44 - DNA, 60 bp, Artificial Sequence
  Description of Artificial Sequence: targeting sequence/synthetic sequence
gtggaggcggccgcctcccagcgcagctcatccctggcttccaacaggctgaagattgcc

SEQ ID NO: 45 - DNA, 60 bp, Artificial Sequence
  Description of Artificial Sequence: targeting sequence/synthetic sequence
gcccaccccgagttgaagaccccactaaccgccaacatcacaaaatccggaaacacattc

SEQ ID NO: 46 - DNA, 60 bp, Artificial Sequence
  Description of Artificial Sequence: targeting sequence/synthetic sequence
gacagcatcggcgtgctgggctaccagaagaccgtggaccacaccaaggtgaacagcaag

SEQ ID NO: 47 - DNA, 60 bp, Artificial Sequence
  Description of Artificial Sequence: targeting sequence/synthetic sequence
agccatgtccagctgcaaaattattcaaaggtggaaaggcatcctgtgactgcattggag

SEQ ID NO: 48 - DNA, 60 bp, Artificial Sequence
  Description of Artificial Sequence: targeting sequence/synthetic sequence
gcatccagcacaatggcaaagtcagagaacttggtgaagagccatgtccagctgcaaaat

SEQ ID NO: 49 - DNA, 60 bp, Artificial Sequence
  Description of Artificial Sequence: targeting sequence/synthetic sequence
aaacaggtccaccccgacaccggcatctcctctaaagccatggggatcatgaattccttt

SEQ ID NO: 50 - DNA, 60 bp, Artificial Sequence
  Description of Artificial Sequence: targeting sequence/synthetic sequence
gttctgggacagaagctgtccttaacccagagtgacatcagccatattggctccatgaga

SEQ ID NO: 51 - DNA, 60 bp, Artificial Sequence
  Description of Artificial Sequence: targeting sequence/synthetic sequence
tcacgaggcactacaggaaacacacaggtgcaaagcccttcaaatgcaaccactgcgaca

SEQ ID NO: 52 - DNA, 60 bp, Artificial Sequence
  Description of Artificial Sequence: targeting sequence/synthetic sequence
ccagccggcggctccagctccaacagcacccgagagccgcccgcctcgggtcgggtggcg

SEQ ID NO: 53 - DNA, 60 bp, Artificial Sequence
  Description of Artificial Sequence: targeting sequence/synthetic sequence
gaggtttccagcttgccgacaaccaactcaacaaccaattcagccaccaaaataacagct

SEQ ID NO: 54 - DNA, 60 bp, Artificial Sequence
  Description of Artificial Sequence: targeting sequence/synthetic sequence
gtgctgaagcaggtccatcccgacaccggcatctcttccaaggcaatggggatcatgaat

SEQ ID NO: 55 - DNA, 60 bp, Artificial Sequence
  Description of Artificial Sequence: targeting sequence/synthetic sequence
ctggtcccagccggcggctccagctccaacagcacccgagagccgcccgcctcgggtcgg

SEQ ID NO: 56 - DNA, 60 bp, Artificial Sequence
  Description of Artificial Sequence: targeting sequence/synthetic sequence
aatcagggaagtaagtacgtcaataaggaaattcaaaatgctgtcaacggggtgaaacag

SEQ ID NO: 57 - DNA, 60 bp, Artificial Sequence
  Description of Artificial Sequence: targeting sequence/synthetic sequence
aagcccaccagcaatgtgcatgtgtctgtggccggctcacactcacaggcagccaacttt

SEQ ID NO: 58 - DNA, 60 bp, Artificial Sequence
  Description of Artificial Sequence: targeting sequence/synthetic sequence
tcggttctcaattccaacgctatcaagaacctgcccccaccgctgggcggcgctgcgggg

SEQ ID NO: 59 - DNA, 60 bp, Artificial Sequence
  Description of Artificial Sequence: targeting sequence/synthetic sequence
gtgggcacccagggccgcgcctgcaacaagacggctccccaggccagcggctgtgacctc

SEQ ID NO: 60 - DNA, 60 bp, Artificial Sequence
  Description of Artificial Sequence: targeting sequence/synthetic sequence
agcgacagcatcggcgtgctgggctaccagaagaccgtggaccacaccaaggtgaacagc

SEQ ID NO: 61 - DNA, 60 bp, Artificial Sequence
  Description of Artificial Sequence: targeting sequence/synthetic sequence
gacttccgcatccacgtggagaaccagacgcgggctcgggacgatgtgagccgtaagcag

SEQ ID NO: 62 - DNA, 60 bp, Artificial Sequence
  Description of Artificial Sequence: targeting sequence/synthetic sequence
tccatgagtaaccacacaaaggaaagggtgacaatgaccaaagtgacactggagaatttt

SEQ ID NO: 63 - DNA, 60 bp, Artificial Sequence
  Description of Artificial Sequence: targeting sequence/synthetic sequence
aagcaggtgcaccccgacaccggcatctcgtccaaggccatgggcatcatgaactccttc

SEQ ID NO: 64 - DNA, 60 bp, Artificial Sequence
  Description of Artificial Sequence: targeting sequence/synthetic sequence
ctgaagcaggtccaccccgacaccggcatctcctctaaggccatgggaatcatgaactcc

SEQ ID NO: 65 - DNA, 60 bp, Artificial Sequence
  Description of Artificial Sequence: targeting sequence/synthetic sequence
gtcacctggctggttcgccacacagagaatgtcaccaagacaaagacacctgaggactat

SEQ ID NO: 66 - DNA, 60 bp, Artificial Sequence
  Description of Artificial Sequence: targeting sequence/synthetic sequence
aatggacctgaattttccaatgacatcaagaaaaggaaggtggatgataaggactccagc

SEQ ID NO: 67 - DNA, 60 bp, Artificial Sequence
  Description of Artificial Sequence: targeting sequence/synthetic sequence
gtttccagcttgccgacaaccaactcaacaaccaattcagccaccaaaataacagctaat

SEQ ID NO: 68 - DNA, 60 bp, Artificial Sequence
  Description of Artificial Sequence: targeting sequence/synthetic sequence
aatgtgcatgtgtctgtggccggctcacactcacaggcagccaactttgcagcccagaag

SEQ ID NO: 69 - DNA, 60 bp, Artificial Sequence
  Description of Artificial Sequence: targeting sequence/synthetic sequence
ttggagaccggcggcgaggccgggatcacccgatcggtggtggccaccactcgagcccgg

SEQ ID NO: 70 - DNA, 60 bp, Artificial Sequence
  Description of Artificial Sequence: targeting sequence/synthetic sequence
gttcgccacacagagaatgtcaccaagacaaagacacctgaggactatgctgactcgagc

SEQ ID NO: 71 - DNA, 60 bp, Artificial Sequence
  Description of Artificial Sequence: targeting sequence/synthetic sequence
accttgaactcggttctcaattccaacgctatcaagaacctgcccccaccgctgggcggc

SEQ ID NO: 72 - DNA, 60 bp, Artificial Sequence
  Description of Artificial Sequence: targeting sequence/synthetic sequence
cccgagttgaagaccccactaaccgccaacatcacaaaatccggaaacacattccggccc

SEQ ID NO: 73 - DNA, 60 bp, Artificial Sequence
  Description of Artificial Sequence: targeting sequence/synthetic sequence
ctgaaacaggtccatcccgacactggcatctcttccaaggccatgggcatcatgaattct

SEQ ID NO: 74 - DNA, 60 bp, Artificial Sequence
  Description of Artificial Sequence: targeting sequence/synthetic sequence
cgggtgaacaatagctccaccaacgacaacctggtgcggaagaacgaccaggtgtacatc

SEQ ID NO: 75 - DNA, 60 bp, Artificial Sequence
  Description of Artificial Sequence: targeting sequence/synthetic sequence
ctgaaacaggtccaccccgacaccggcatctcctctaaagccatggggatcatgaattcc

SEQ ID NO: 76 - DNA, 60 bp, Artificial Sequence
  Description of Artificial Sequence: targeting sequence/synthetic sequence
cagcgggtgaacaatagctccaccaacgacaacctggtgcggaagaacgaccaggtgtac

SEQ ID NO: 77 - DNA, 60 bp, Artificial Sequence
  Description of Artificial Sequence: targeting sequence/synthetic sequence
gagtatcctgagcgcccggccagccgggccaacaccgtgaggagcttccaccacgaagaa

SEQ ID NO: 78 - DNA, 60 bp, Artificial Sequence
  Description of Artificial Sequence: targeting sequence/synthetic sequence
agtgtgggcacccagggccgcgcctgcaacaagacggctccccaggccagcggctgtgac

SEQ ID NO: 79 - DNA, 60 bp, Artificial Sequence
  Description of Artificial Sequence: targeting sequence/synthetic sequence
caggggctggtcccagccggcggctccagctccaacagcacccgagagccgcccgcctcg

SEQ ID NO: 80 - DNA, 60 bp, Artificial Sequence
  Description of Artificial Sequence: targeting sequence/synthetic sequence
cgcttccaggactcctcttcctcaaaggcccctccccccagccttccaagtccatcccga

SEQ ID NO: 81 - DNA, 60 bp, Artificial Sequence
  Description of Artificial Sequence: targeting sequence/synthetic sequence
ctgaagcaggtccaccctgacaccggcatttcgtccaaggccatgggcatcatgaattcg

SEQ ID NO: 82 - DNA, 60 bp, Artificial Sequence
  Description of Artificial Sequence: targeting sequence/synthetic sequence
aagcaggtccaccccgacaccggcatctcgtccaaggccatgggcatcatgaactccttc

SEQ ID NO: 83 - DNA, 60 bp, Artificial Sequence
  Description of Artificial Sequence: targeting sequence/synthetic sequence
cttcgtcatcttggactcagtaaaagtgattctagcaatagtgattccactcagagtcag

SEQ ID NO: 84 - DNA, 60 bp, Artificial Sequence
  Description of Artificial Sequence: targeting sequence/synthetic sequence
ggcgccgctatgggcgccgctagcctgaccctgagcgcccagagccggaccctgctcgcc

SEQ ID NO: 85 - DNA, 60 bp, Artificial Sequence
  Description of Artificial Sequence: targeting sequence/synthetic sequence
gtgctaaagcaggtccaccccgacaccggcatctcatccaaggccatgggcatcatgaac

SEQ ID NO: 86 - DNA, 60 bp, Artificial Sequence
  Description of Artificial Sequence: targeting sequence/synthetic sequence
aagagcgtgagcggcgacgtggagctgaccaacatcattaagaacagctccttcaaggcc

SEQ ID NO: 87 - DNA, 60 bp, Artificial Sequence
  Description of Artificial Sequence: targeting sequence/synthetic sequence
gttctgaagcaggtccaccctgacaccggcatttcgtccaaggccatgggcatcatgaat

SEQ ID NO: 88 - DNA, 60 bp, Artificial Sequence
  Description of Artificial Sequence: targeting sequence/synthetic sequence
tacatggctgcctcagggctgaacgccagcacctacgatcaggtgggccgctcccacatc

SEQ ID NO: 89 - DNA, 60 bp, Artificial Sequence
  Description of Artificial Sequence: targeting sequence/synthetic sequence
gccggcctggtgaccggcatggccgacggcgtggtcgccagcaaccacgccggctacgag

SEQ ID NO: 90 - DNA, 60 bp, Artificial Sequence
  Description of Artificial Sequence: targeting sequence/synthetic sequence
tggctggaggaccagcgtgaggtgaacacttctgggtttgcccccgcacgcccccctcca

SEQ ID NO: 91 - DNA, 60 bp, Artificial Sequence
  Description of Artificial Sequence: targeting sequence/synthetic sequence
atcaatcatagtggaagcaccaactacaacccgtccctcaagagtcgagtcaccatatca

SEQ ID NO: 92 - DNA, 60 bp, Artificial Sequence
  Description of Artificial Sequence: targeting sequence/synthetic sequence
ctggttcgccacacagagaatgtcaccaagacaaagacacctgaggactatgctgactcg

SEQ ID NO: 93 - DNA, 60 bp, Artificial Sequence
  Description of Artificial Sequence: targeting sequence/synthetic sequence
tccaatcagggaagtaagtacgtcaataaggaaattcaaaatgctgtcaacggggtgaaa

SEQ ID NO: 94 - DNA, 60 bp, Artificial Sequence
  Description of Artificial Sequence: targeting sequence/synthetic sequence
catgtgtctgtggccggctcacactcacaggcagccaactttgcagcccagaagacccac

SEQ ID NO: 95 - DNA, 60 bp, Artificial Sequence
  Description of Artificial Sequence: targeting sequence/synthetic sequence
agtgcgggcccgggcacctcggggagccacctggacagatccacagtgtcttccttctct

SEQ ID NO: 96 - DNA, 60 bp, Artificial Sequence
  Description of Artificial Sequence: targeting sequence/synthetic sequence
ggcagcgccatgggcgccgctagcctgaccctgagcgcccagagccggaccctgctcgcc

SEQ ID NO: 97 - DNA, 60 bp, Artificial Sequence
  Description of Artificial Sequence: targeting sequence/synthetic sequence
tccagcacaatggcaaagtcagagaacttggtgaagagccatgtccagctgcaaaattat

SEQ ID NO: 98 - DNA, 60 bp, Artificial Sequence
  Description of Artificial Sequence: targeting sequence/synthetic sequence
atgttgacctgccccgaggcaaacgcgaccaaggtatgcggtagtgacggggtgacctac

SEQ ID NO: 99 - DNA, 60 bp, Artificial Sequence
  Description of Artificial Sequence: targeting sequence/synthetic sequence
gtcccagccggcggctccagctccaacagcacccgagagccgcccgcctcgggtcgggtg

SEQ ID NO: 100 - DNA, 60 bp, Artificial Sequence
  Description of Artificial Sequence: targeting sequence/synthetic sequence
ccagaagaaaataaaattcgtcaggaagatttaacaaaaattataagtagtgctcagaag

SEQ ID NO: 101 - DNA, 60 bp, Artificial Sequence
  Description of Artificial Sequence: targeting sequence/synthetic sequence
ctgaccgccgagatcctggaactggcgggcaacgcggcccgcgacaacaagaagacccgc

SEQ ID NO: 102 - DNA, 60 bp, Artificial Sequence
  Description of Artificial Sequence: targeting sequence/synthetic sequence
tataggcaagtgaatcaaatcagtggagctcacaatacctcagacaagcaaaccccttca

SEQ ID NO: 103 - DNA, 60 bp, Artificial Sequence
  Description of Artificial Sequence: targeting sequence/synthetic sequence
gaggtgcataatgccaagacaaagccgcgggaggagcagtacaacagcacgtaccgtgtg

SEQ ID NO: 104 - DNA, 60 bp, Artificial Sequence
  Description of Artificial Sequence: targeting sequence/synthetic sequence
tcaaaaccagaagaaaataaaattcgtcaggaagatttaacaaaaattataagtagtgct

SEQ ID NO: 105 - DNA, 60 bp, Artificial Sequence
  Description of Artificial Sequence: targeting sequence/synthetic sequence
ctgaacctggagggcaacggcatcgccaccgacgtgcccagcgccaccaagcggtggggc

SEQ ID NO: 106 - DNA, 60 bp, Artificial Sequence
  Description of Artificial Sequence: targeting sequence/synthetic sequence
gaagaaaataaaattcgtcaggaagatttaacaaaaattataagtagtgctcagaaggtt

SEQ ID NO: 107 - DNA, 60 bp, Artificial Sequence
  Description of Artificial Sequence: targeting sequence/synthetic sequence
aacgtgatccgtgacgctgtcacctatacggagcacgccaagcgcaagacagtcactgcc

SEQ ID NO: 108 - DNA, 60 bp, Artificial Sequence
  Description of Artificial Sequence: targeting sequence/synthetic sequence
aggcaagtgaatcaaatcagtggagctcacaatacctcagacaagcaaaccccttcaaaa

SEQ ID NO: 109 - DNA, 60 bp, Artificial Sequence
  Description of Artificial Sequence: targeting sequence/synthetic sequence
actgccgagatcctggagctggcgggcaacgccgcccgcgacaacaagaagacccgcatt

SEQ ID NO: 110 - DNA, 60 bp, Artificial Sequence
  Description of Artificial Sequence: targeting sequence/synthetic sequence
aacctggagggcaacggcatcgccaccgacgtgcccagcgccaccaagcggtggggcttc

SEQ ID NO: 111 - DNA, 60 bp, Artificial Sequence
  Description of Artificial Sequence: targeting sequence/synthetic sequence
ggcctgaacctggagggcaacggcatcgccaccgacgtgcccagcgccaccaagcggtgg

SEQ ID NO: 112 - DNA, 60 bp, Artificial Sequence
  Description of Artificial Sequence: targeting sequence/synthetic sequence
ctgaccgctgagatcctggagctggctggcaatgcggcccgcgacaacaagaagacccgt

SEQ ID NO: 113 - DNA, 60 bp, Artificial Sequence
  Description of Artificial Sequence: targeting sequence/synthetic sequence
gagagacctggtggaaatgagattactcgaggaggctccacctcttatggaaccggatca

SEQ ID NO: 114 - DNA, 60 bp, Artificial Sequence
  Description of Artificial Sequence: targeting sequence/synthetic sequence
ctggagcagaacgggagcccgctaggaagaggaaggcttgggagtacaggtgcaaaaatg

SEQ ID NO: 115 - DNA, 60 bp, Artificial Sequence
  Description of Artificial Sequence: targeting sequence/synthetic sequence
gtgaaggccgggcctgcccagacccttattcggccccaggacatgaagggtgcctctcga

SEQ ID NO: 116 - DNA, 60 bp, Artificial Sequence
  Description of Artificial Sequence: targeting sequence/synthetic sequence
actgccgagatcctggagcttgccggcaacgcggcgcgcgacaacaagaagacgcgcatc

SEQ ID NO: 117 - DNA, 60 bp, Artificial Sequence
  Description of Artificial Sequence: targeting sequence/synthetic sequence
tcatcttcaaaaccagaagaaaataaaattcgtcaggaagatttaacaaaaattataagt

SEQ ID NO: 118 - DNA, 60 bp, Artificial Sequence
  Description of Artificial Sequence: targeting sequence/synthetic sequence
accatcttaagagatgattcgaagaactcagtgcatctccaaatgaacagcctcaaaacc

SEQ ID NO: 119 - DNA, 60 bp, Artificial Sequence
  Description of Artificial Sequence: targeting sequence/synthetic sequence
acggccgagatcttagagctagctggcaacgcggctcgcgacaataagaagacccgcatc

SEQ ID NO: 120 - DNA, 60 bp, Artificial Sequence
  Description of Artificial Sequence: targeting sequence/synthetic sequence
ttccagttttccagcaacaaggaacagaacggagtacaagatcctcagcatgagagaatt

SEQ ID NO: 121 - DNA, 60 bp, Artificial Sequence
  Description of Artificial Sequence: targeting sequence/synthetic sequence
gaggtgcataatgccaagacaaagccgcgggaggagcagttcaacagcacgtaccgtgtg

SEQ ID NO: 122 - DNA, 60 bp, Artificial Sequence
  Description of Artificial Sequence: targeting sequence/synthetic sequence
ctaactgccgagatcctggagctggcgggcaacgcagcccgcgacaacaaaaagacccgc

SEQ ID NO: 123 - DNA, 60 bp, Artificial Sequence
  Description of Artificial Sequence: targeting sequence/synthetic sequence
ttcgtgaccaagctgaagcagctggagatgctggagaaccagatcgccaccatccaccag

SEQ ID NO: 124 - DNA, 60 bp, Artificial Sequence
  Description of Artificial Sequence: targeting sequence/synthetic sequence
agtattgtggctgaccagttagagaagaataggttgccttctgtgcatcctcatcatagt

SEQ ID NO: 125 - DNA, 60 bp, Artificial Sequence
  Description of Artificial Sequence: targeting sequence/synthetic sequence
ttaataactaatagtgtggagatgcatgcctatactgtccagcgcctgtacaaagcaatt

SEQ ID NO: 126 - DNA, 60 bp, Artificial Sequence
  Description of Artificial Sequence: targeting sequence/synthetic sequence
gccatgggcgccggcgtggccggccggatcaccggcagcatgagcctggccagcggcaag

SEQ ID NO: 127 - DNA, 60 bp, Artificial Sequence
  Description of Artificial Sequence: targeting sequence/synthetic sequence
accgccgagatcctggagctggcgggcaacgcggctcgggacaacaagaagacgcgcatc

SEQ ID NO: 128 - DNA, 60 bp, Artificial Sequence
  Description of Artificial Sequence: targeting sequence/synthetic sequence
cttacggcggagatcctggagctggctggcaacgccgcgcgtgacaacaagaagaccagg

SEQ ID NO: 129 - DNA, 60 bp, Artificial Sequence
  Description of Artificial Sequence: targeting sequence/synthetic sequence
gtggaggtgcataatgccaagacaaagccgcgggaggagcagtacaacagcacgtaccgt

SEQ ID NO: 130 - DNA, 60 bp, Artificial Sequence
  Description of Artificial Sequence: targeting sequence/synthetic sequence
gtttcatcttcaaaaccagaagaaaataaaattcgtcaggaagatttaacaaaaattata

SEQ ID NO: 131 - DNA, 60 bp, Artificial Sequence
  Description of Artificial Sequence: targeting sequence/synthetic sequence
aaattccagttttccagcaacaaggaacagaacggagtacaagatcctcagcatgagaga

SEQ ID NO: 132 - DNA, 60 bp, Artificial Sequence
  Description of Artificial Sequence: targeting sequence/synthetic sequence
acagcagaaatccttgagctggcaggcaatgcgtctcgcgataacaaaaaaactcgcatt

SEQ ID NO: 133 - DNA, 60 bp, Artificial Sequence
  Description of Artificial Sequence: targeting sequence/synthetic sequence
aataaaattcgtcaggaagatttaacaaaaattataagtagtgctcagaaggttcagata

SEQ ID NO: 134 - DNA, 60 bp, Artificial Sequence
  Description of Artificial Sequence: targeting sequence/synthetic sequence
gagttcgtgaatgatctaaagcgggccaacagcaacctggtggctgcctatgagaaagca

SEQ ID NO: 135 - DNA, 60 bp, Artificial Sequence
  Description of Artificial Sequence: targeting sequence/synthetic sequence
aacctggagggcaacggcgtggccaccgacgtgcccaccgccaccaagcggtggggcttc

SEQ ID NO: 136 - DNA, 60 bp, Artificial Sequence
  Description of Artificial Sequence: targeting sequence/synthetic sequence
gcgttggctgccgccggctatgatgtggagaaaaacaacagccgtatcaaacttggtctc

SEQ ID NO: 137 - DNA, 60 bp, Artificial Sequence
  Description of Artificial Sequence: targeting sequence/synthetic sequence
attcgtcaggaagatttaacaaaaattataagtagtgctcagaaggttcagataaaacag

SEQ ID NO: 138 - DNA, 60 bp, Artificial Sequence
  Description of Artificial Sequence: targeting sequence/synthetic sequence
tcttcaaaaccagaagaaaataaaattcgtcaggaagatttaacaaaaattataagtagt

SEQ ID NO: 139 - DNA, 60 bp, Artificial Sequence
  Description of Artificial Sequence: targeting sequence/synthetic sequence
ctgaccgccgagatcctggagctggcgggcaacgccgcccgcgacaacaagaagacccgc

SEQ ID NO: 140 - DNA, 60 bp, Artificial Sequence
  Description of Artificial Sequence: targeting sequence/synthetic sequence
acaatggcaaagtcagagaacttggtgaagagccatgtccagctgcaaaattattcaaag

SEQ ID NO: 141 - DNA, 60 bp, Artificial Sequence
  Description of Artificial Sequence: targeting sequence/synthetic sequence
atgttggaatccaacaatgtgatcactttcaatggcttggccaacagctccagttatcat

SEQ ID NO: 142 - DNA, 60 bp, Artificial Sequence
  Description of Artificial Sequence: targeting sequence/synthetic sequence
ctggacaagaactacctgctcaacaataagatccccagcaacaatgtggaggaagccggc

SEQ ID NO: 143 - DNA, 60 bp, Artificial Sequence
  Description of Artificial Sequence: targeting sequence/synthetic sequence
cggagattcgtgcagaacgccctgaacggcaacggcgaccccaacaatatggaccgggcc

SEQ ID NO: 144 - DNA, 60 bp, Artificial Sequence
  Description of Artificial Sequence: targeting sequence/synthetic sequence
aacgtgatccgggacgccgtgacctatacagagcacgccaagcgcaagacggtcaccgcc

SEQ ID NO: 145 - DNA, 60 bp, Artificial Sequence
  Description of Artificial Sequence: targeting sequence/synthetic sequence
cctggtgcaaatgggcttccaggagctgcaggagaaaggggtgcccctgggttccgagga

SEQ ID NO: 146 - DNA, 60 bp, Artificial Sequence
  Description of Artificial Sequence: targeting sequence/synthetic sequence
agcctcaacaacgccatcctgcgtgccaacctgcccaagagcaagggcaacccggcggct

SEQ ID NO: 147 - DNA, 60 bp, Artificial Sequence
  Description of Artificial Sequence: targeting sequence/synthetic sequence
aagttggtcagtattgtggctgaccagttagagaagaataggttgccttctgtgcatcct

SEQ ID NO: 148 - DNA, 60 bp, Artificial Sequence
  Description of Artificial Sequence: targeting sequence/synthetic sequence
gtgacccgaagcccggggggttcccaggagcagcgagccaaaacgccccaaactcgggtg

SEQ ID NO: 149 - DNA, 60 bp, Artificial Sequence
  Description of Artificial Sequence: targeting sequence/synthetic sequence
tcaggatcatctcagaatagaatacgagattcagaatatgaaattcaacgacaagctaaa

SEQ ID NO: 150 - DNA, 60 bp, Artificial Sequence
  Description of Artificial Sequence: targeting sequence/synthetic sequence
gcattggccgctgctggctacgacgtagagaagaataacagccgcatcaaactgtccctc

SEQ ID NO: 151 - DNA, 60 bp, Artificial Sequence
  Description of Artificial Sequence: targeting sequence/synthetic sequence
ctaaccgccgagatcctggaactggctggcaacgcggcccgcgacaacaagaagacccgc

SEQ ID NO: 152 - DNA, 60 bp, Artificial Sequence
  Description of Artificial Sequence: targeting sequence/synthetic sequence
gccacactcaagtccctcaacaaccagattgagagcatccgcagccccgagggctcccgc

SEQ ID NO: 153 - DNA, 60 bp, Artificial Sequence
  Description of Artificial Sequence: targeting sequence/synthetic sequence
tacttcgcccccgccaacaccgacgccaacaatatcgagggccaggccatccggtaccag

SEQ ID NO: 154 - DNA, 60 bp, Artificial Sequence
  Description of Artificial Sequence: targeting sequence/synthetic sequence
ctcaagtccctcaacaaccagattgagagcatccgcagccccgagggctcccgcaagaac

SEQ ID NO: 155 - DNA, 60 bp, Artificial Sequence
  Description of Artificial Sequence: targeting sequence/synthetic sequence
ttccgtgaaaatgcaatagatggagaacactctggaaaagctactcacgctagaataggt

SEQ ID NO: 156 - DNA, 60 bp, Artificial Sequence
  Description of Artificial Sequence: targeting sequence/synthetic sequence
gtgagcgagggcttcaacatcggcaacctggccgtgaacaatcggggccagagcatcaag

SEQ ID NO: 157 - DNA, 60 bp, Artificial Sequence
  Description of Artificial Sequence: targeting sequence/synthetic sequence
ccccctgtgcccagcgtgcagaagctggtggaggaccggtggaacaagccccagaagacc

SEQ ID NO: 158 - DNA, 60 bp, Artificial Sequence
  Description of Artificial Sequence: targeting sequence/synthetic sequence
tccttccaaggctcaaagagagggctgaactccagttttgaaacctctcctaagaaagtg

SEQ ID NO: 159 - DNA, 60 bp, Artificial Sequence
  Description of Artificial Sequence: targeting sequence/synthetic sequence
gagctgagggcccggctgctgccccatgccaatgaggtgagccagaagatcggggacaac

SEQ ID NO: 160 - DNA, 60 bp, Artificial Sequence
  Description of Artificial Sequence: targeting sequence/synthetic sequence
atccacagggacttgaaaccggacaatatgcttatttctaatgagggtcatattaaactg

SEQ ID NO: 161 - DNA, 60 bp, Artificial Sequence
  Description of Artificial Sequence: targeting sequence/synthetic sequence
gccgctgagcacaacaaggtggtcaccaaggacttcgacgtgatccggaacgtgatcaag

SEQ ID NO: 162 - DNA, 60 bp, Artificial Sequence
  Description of Artificial Sequence: targeting sequence/synthetic sequence
gcggagatcctggagctggctggcaacgccgcgcgtgacaacaagaagaccaggataatt

SEQ ID NO: 163 - DNA, 60 bp, Artificial Sequence
  Description of Artificial Sequence: targeting sequence/synthetic sequence
ctgaccgccgagatcctggagctggcgggcaatgcggcccgcgacaacaagaagacccgc

SEQ ID NO: 164 - DNA, 60 bp, Artificial Sequence
  Description of Artificial Sequence: targeting sequence/synthetic sequence
ctgaccgccgagatcctggagctggccggcaacgcggctcgcgacaacaagaagactcgc

SEQ ID NO: 165 - DNA, 60 bp, Artificial Sequence
  Description of Artificial Sequence: targeting sequence/synthetic sequence
gcagagttcgtgaatgatctaaagcgggccaacagcaacctggtggctgcctatgagaaa

SEQ ID NO: 166 - DNA, 60 bp, Artificial Sequence
  Description of Artificial Sequence: targeting sequence/synthetic sequence
cacaactacacccagccccgtggcaatttcatcccctacgccaacgaggagcgccgcgag

SEQ ID NO: 167 - DNA, 60 bp, Artificial Sequence
  Description of Artificial Sequence: targeting sequence/synthetic sequence
gagcagaacgggagcccgctaggaagaggaaggcttgggagtacaggtgcaaaaatgcag

SEQ ID NO: 168 - DNA, 60 bp, Artificial Sequence
  Description of Artificial Sequence: targeting sequence/synthetic sequence
ctcaccgctgagatcctggagctggcgggcaatgcggcccgcgacaacaagaagacgcga

SEQ ID NO: 169 - DNA, 60 bp, Artificial Sequence
  Description of Artificial Sequence: targeting sequence/synthetic sequence
atcgagaaaaccatctccaaagccaaagggcagccccgagagccacaggtgtacaccctg

SEQ ID NO: 170 - DNA, 60 bp, Artificial Sequence
  Description of Artificial Sequence: targeting sequence/synthetic sequence
ttggtcagtattgtggctgaccagttagagaagaataggttgccttctgtgcatcctcat

SEQ ID NO: 171 - DNA, 60 bp, Artificial Sequence
  Description of Artificial Sequence: targeting sequence/synthetic sequence
ccaggagaatctcctggaattgtgtcaaactataacaactccatcttggcaagggtatat

SEQ ID NO: 172 - DNA, 60 bp, Artificial Sequence
  Description of Artificial Sequence: targeting sequence/synthetic sequence
acatctttgttgaagactgtacagacagatcataatgcagtacagaggcacagaagcaca

SEQ ID NO: 173 - DNA, 60 bp, Artificial Sequence
  Description of Artificial Sequence: targeting sequence/synthetic sequence
gggaaaaagcagcttgtagagattgagaaggttgttctacaccctaactactcccaggta

SEQ ID NO: 174 - DNA, 60 bp, Artificial Sequence
  Description of Artificial Sequence: targeting sequence/synthetic sequence
ctggagggcaacggcgtggccaccgacgtgcccaccgccaccaagcggtggggcttccgg

SEQ ID NO: 175 - DNA, 60 bp, Artificial Sequence
  Description of Artificial Sequence: targeting sequence/synthetic sequence
ggcctcaagagcttggtgagcaaaggtaccctggtgcagaccaaaggtaccggtgcttct

SEQ ID NO: 176 - DNA, 60 bp, Artificial Sequence
  Description of Artificial Sequence: targeting sequence/synthetic sequence
aaggttggtcttcaggttgtggcagtcaaggctccagggtttggtgacaatagaaagaac

SEQ ID NO: 177 - DNA, 60 bp, Artificial Sequence
  Description of Artificial Sequence: targeting sequence/synthetic sequence
ttgttgaagactgtacagacagatcataatgcagtacagaggcacagaagcacaattgtg

SEQ ID NO: 178 - DNA, 60 bp, Artificial Sequence
  Description of Artificial Sequence: targeting sequence/synthetic sequence
cagggtcagcaggcccaaacccccacaggcaagcaaactgacaaaaccaagagtaacatg

SEQ ID NO: 179 - DNA, 60 bp, Artificial Sequence
  Description of Artificial Sequence: targeting sequence/synthetic sequence
tacctcaaccaaccgcatctcaacaaattccgcgacaaccagatcagtacggccaagtac

SEQ ID NO: 180 - DNA, 60 bp, Artificial Sequence
  Description of Artificial Sequence: targeting sequence/synthetic sequence
gtgtcatccttccaaggctcaaagagagggctgaactccagttttgaaacctctcctaag

SEQ ID NO: 181 - DNA, 60 bp, Artificial Sequence
  Description of Artificial Sequence: targeting sequence/synthetic sequence
ctgaccgcggaaattctggagctggcgggcaacgcggctcgggacaacaagaagacgcgc

SEQ ID NO: 182 - DNA, 60 bp, Artificial Sequence
  Description of Artificial Sequence: targeting sequence/synthetic sequence
ctgaccgccgagatcctggagctggcgggcaacgcggctcgggacaacaagaagacgcgc

SEQ ID NO: 183 - DNA, 60 bp, Artificial Sequence
  Description of Artificial Sequence: targeting sequence/synthetic sequence
gcagctgcacggcctgtgacccgaagcccggggggttcccaggagcagcgagccaaaacg

SEQ ID NO: 184 - DNA, 60 bp, Artificial Sequence
  Description of Artificial Sequence: targeting sequence/synthetic sequence
tactcacagatgcagtctcaagctggtggaaacaatactggttcaactccactaagaaaa

SEQ ID NO: 185 - DNA, 60 bp, Artificial Sequence
  Description of Artificial Sequence: targeting sequence/synthetic sequence
ggcctgctcatccccaccagcggcaccgacaccacagtgaccaagcccaagagccggatc

SEQ ID NO: 186 - DNA, 60 bp, Artificial Sequence
  Description of Artificial Sequence: targeting sequence/synthetic sequence
atggcaaagtcagagaacttggtgaagagccatgtccagctgcaaaattattcaaaggtg

SEQ ID NO: 187 - DNA, 60 bp, Artificial Sequence
  Description of Artificial Sequence: targeting sequence/synthetic sequence
aagtccctcaacaaccagattgagagcatccgcagccccgagggctcccgcaagaaccct

SEQ ID NO: 188 - DNA, 60 bp, Artificial Sequence
  Description of Artificial Sequence: targeting sequence/synthetic sequence
ccagagacctttctgtccaccaacaagctggagaaccagctgctgctacagaggcagaag

SEQ ID NO: 189 - DNA, 60 bp, Artificial Sequence
  Description of Artificial Sequence: targeting sequence/synthetic sequence
tcgatcaaggcgctggtgcagaacgacacgcttctgcaggtgaagggcaccggcgccaac

SEQ ID NO: 190 - DNA, 60 bp, Artificial Sequence
  Description of Artificial Sequence: targeting sequence/synthetic sequence
aatgtaatccgcgatgcagttacctacacggagcacgccaaacgcaagacagtcacagcc

SEQ ID NO: 191 - DNA, 60 bp, Artificial Sequence
  Description of Artificial Sequence: targeting sequence/synthetic sequence
atgagaatggagttagagagacctggtggaaatgagattactcgaggaggctccacctct

SEQ ID NO: 192 - DNA, 60 bp, Artificial Sequence
  Description of Artificial Sequence: targeting sequence/synthetic sequence
atcgagaaaaccatctccaaaaccaaagggcagccccgagaaccacaggtgtacaccctg

SEQ ID NO: 193 - DNA, 60 bp, Artificial Sequence
  Description of Artificial Sequence: targeting sequence/synthetic sequence
attcctcatatgacctcagagaacacagtgctccaagggtataccattcctaaaggcaca

SEQ ID NO: 194 - DNA, 60 bp, Artificial Sequence
  Description of Artificial Sequence: targeting sequence/synthetic sequence
gataattatggaacccagctcaatgctgtgaataactccctgactccgcaatcaaccaag

SEQ ID NO: 195 - DNA, 60 bp, Artificial Sequence
  Description of Artificial Sequence: targeting sequence/synthetic sequence
atcgagaaaaccatctccaaaaccaaaggacagccccgagaaccacaggtgtacaccctg

SEQ ID NO: 196 - DNA, 60 bp, Artificial Sequence
  Description of Artificial Sequence: targeting sequence/synthetic sequence
agaaataacatgatccagaccaagccaacaggaacccagcaatcgaccaatacagctgtg

SEQ ID NO: 197 - DNA, 60 bp, Artificial Sequence
  Description of Artificial Sequence: targeting sequence/synthetic sequence
ccccctctgcccagcgtgaccaagctgaccgaggaccggtggaacaagccccagaagacc

SEQ ID NO: 198 - DNA, 60 bp, Artificial Sequence
  Description of Artificial Sequence: targeting sequence/synthetic sequence
ctgaccgccgagatcctggagctggctggcaacgcggcccgcgacaacaagaagactcgc

SEQ ID NO: 199 - DNA, 60 bp, Artificial Sequence
  Description of Artificial Sequence: targeting sequence/synthetic sequence
aaggtggtcaccaaggacttcgacgtgatccggaacgtgatcaaggacaacgccaccttc

SEQ ID NO: 200 - DNA, 60 bp, Artificial Sequence
  Description of Artificial Sequence: targeting sequence/synthetic sequence
aaagcgctggcagccgctggctatgacgtggagaagaacaacagccgcatcaagctgggt

SEQ ID NO: 201 - DNA, 60 bp, Artificial Sequence
  Description of Artificial Sequence: targeting sequence/synthetic sequence
atcgagaaaaccatctccaaagccaaagggcagccccgagaaccacaggtgtacaccctg

SEQ ID NO: 202 - DNA, 60 bp, Artificial Sequence
  Description of Artificial Sequence: targeting sequence/synthetic sequence
tctcagaatagaatacgagattcagaatatgaaattcaacgacaagctaaaaaaagtttt

SEQ ID NO: 203 - DNA, 60 bp, Artificial Sequence
  Description of Artificial Sequence: targeting sequence/synthetic sequence
tctttgttgaagactgtacagacagatcataatgcagtacagaggcacagaagcacaatt

SEQ ID NO: 204 - DNA, 60 bp, Artificial Sequence
  Description of Artificial Sequence: targeting sequence/synthetic sequence
aacaaggtggtcaccaaggacttcgacgtgatccggaacgtgatcaaggacaacgccacc

SEQ ID NO: 205 - DNA, 60 bp, Artificial Sequence
  Description of Artificial Sequence: targeting sequence/synthetic sequence
gttgcagccaacgtgattgggattggggagcccagccgcccctcagagaaacggagaaca

SEQ ID NO: 206 - DNA, 60 bp, Artificial Sequence
  Description of Artificial Sequence: targeting sequence/synthetic sequence
ttgactgccgagatcctggagcttgccggcaacgcggcgcgcgacaacaagaagacgcgc

SEQ ID NO: 207 - DNA, 60 bp, Artificial Sequence
  Description of Artificial Sequence: targeting sequence/synthetic sequence
ggccgacaagatacctctcgcatgtccacctcacagattcctggtcgggtggcttccagt

SEQ ID NO: 208 - DNA, 60 bp, Artificial Sequence
  Description of Artificial Sequence: targeting sequence/synthetic sequence
aagaccagctccagcaagagcaccatcttcagcggcaacggccggaacgtggtcgtggag

SEQ ID NO: 209 - DNA, 60 bp, Artificial Sequence
  Description of Artificial Sequence: targeting sequence/synthetic sequence
agccgggtgaacgccgctgtggccaaccgggacagcgccaacggcttcatcaacaaggtg

SEQ ID NO: 210 - DNA, 60 bp, Artificial Sequence
  Description of Artificial Sequence: targeting sequence/synthetic sequence
gagatccggaaggtgatcaaggacaacgccaccttcagcaccaagaaccccgcctacccc

SEQ ID NO: 211 - DNA, 60 bp, Artificial Sequence
  Description of Artificial Sequence: targeting sequence/synthetic sequence
ggcgccggcgtggccggccggatcaccggcagcatgagcctggccagcggcaagagcctg

SEQ ID NO: 212 - DNA, 60 bp, Artificial Sequence
  Description of Artificial Sequence: targeting sequence/synthetic sequence
aaagcgcttgcggctgccggctacgatgtagaaaaaaacaacagccgtatcaagcttggc

SEQ ID NO: 213 - DNA, 60 bp, Artificial Sequence
  Description of Artificial Sequence: targeting sequence/synthetic sequence
cccatcctgctccccaacaagagcggcaagaaaggcaacagcgccgacctgaccttcccc

SEQ ID NO: 214 - DNA, 60 bp, Artificial Sequence
  Description of Artificial Sequence: targeting sequence/synthetic sequence
gtggcagtcaaggctccagggtttggtgacaatagaaagaaccagcttaaagatatggct

SEQ ID NO: 215 - DNA, 60 bp, Artificial Sequence
  Description of Artificial Sequence: targeting sequence/synthetic sequence
accagaggagatgctttccttaacaaaaatagtatcttatcaaacatccatgaagtacat

SEQ ID NO: 216 - DNA, 60 bp, Artificial Sequence
  Description of Artificial Sequence: targeting sequence/synthetic sequence
attctggctaagataccttctgaaaataacaaactaacgtactcacatggcaattatttg

SEQ ID NO: 217 - DNA, 60 bp, Artificial Sequence
  Description of Artificial Sequence: targeting sequence/synthetic sequence
cacagggacttgaaaccggacaatatgcttatttctaatgagggtcatattaaactgacg

SEQ ID NO: 218 - DNA, 60 bp, Artificial Sequence
  Description of Artificial Sequence: targeting sequence/synthetic sequence
tcagtccagtatgatatcaacctggtagagacgagcagtaccagtgcccaccacagtcat

SEQ ID NO: 219 - DNA, 60 bp, Artificial Sequence
  Description of Artificial Sequence: targeting sequence/synthetic sequence
gtgaccaagctgaccgaggaccggtggaacgagcaccagaagatgcagggccaccggggc

SEQ ID NO: 220 - DNA, 60 bp, Artificial Sequence
  Description of Artificial Sequence: targeting sequence/synthetic sequence
ctgctccccaacaagagcggcaagaaaggcaacagcgccgacctgaccttccccgagaag

SEQ ID NO: 221 - DNA, 60 bp, Artificial Sequence
  Description of Artificial Sequence: targeting sequence/synthetic sequence
aggaaggtttcatcttcaaaaccagaagaaaataaaattcgtcaggaagatttaacaaaa

SEQ ID NO: 222 - DNA, 60 bp, Artificial Sequence
  Description of Artificial Sequence: targeting sequence/synthetic sequence
ggtcctgctggcaaagaaggcggcaaaggtccccgtggtgagactggccctgctggacgt

SEQ ID NO: 223 - DNA, 60 bp, Artificial Sequence
  Description of Artificial Sequence: targeting sequence/synthetic sequence
gggtgccagattagcggacgcggtgcccgcggttgcaacgggatcccgggcgctgcagct

SEQ ID NO: 224 - DNA, 60 bp, Artificial Sequence
  Description of Artificial Sequence: targeting sequence/synthetic sequence
atccccaccagcggcaccgacaccacagtgaccaagcccaagagccggatcttcggcaac

SEQ ID NO: 225 - DNA, 60 bp, Artificial Sequence
  Description of Artificial Sequence: targeting sequence/synthetic sequence
aggatcaatgacatttcacacacgcagtcagtctcctccaaacagaaagtcaccggtttg

SEQ ID NO: 226 - DNA, 60 bp, Artificial Sequence
  Description of Artificial Sequence: targeting sequence/synthetic sequence
tcatccttccaaggctcaaagagagggctgaactccagttttgaaacctctcctaagaaa

SEQ ID NO: 227 - DNA, 60 bp, Artificial Sequence
  Description of Artificial Sequence: targeting sequence/synthetic sequence
aagagcctggtaagcaagggaacgttggtgcagacaaagggtaccggagcctcgggttcc

SEQ ID NO: 228 - DNA, 60 bp, Artificial Sequence
  Description of Artificial Sequence: targeting sequence/synthetic sequence
aatgacatttcacacacgcagtcagtctcctccaaacagaaagtcaccggtttggacttc

SEQ ID NO: 229 - DNA, 60 bp, Artificial Sequence
  Description of Artificial Sequence: targeting sequence/synthetic sequence
gggctccctggtgttggcctcacaccttcagctgcccagactgcccgtcagcaccccaag

SEQ ID NO: 230 - DNA, 60 bp, Artificial Sequence
  Description of Artificial Sequence: targeting sequence/synthetic sequence
gagaaaaccatctccaaaaccaaaggacagccccgagaaccacaggtgtacaccctgccc

SEQ ID NO: 231 - DNA, 60 bp, Artificial Sequence
  Description of Artificial Sequence: targeting sequence/synthetic sequence
aacgagtacttcaacagcatcaacgacagcaagatcctgagcctgcagaacaagaaaaac

SEQ ID NO: 232 - DNA, 60 bp, Artificial Sequence
  Description of Artificial Sequence: targeting sequence/synthetic sequence
aacgttattcgagacgccgtcacctatacggagcacgccaagcgcaaaactgtcacagcc

SEQ ID NO: 233 - DNA, 60 bp, Artificial Sequence
  Description of Artificial Sequence: targeting sequence/synthetic sequence
aaggaggatgaaaaccgcaataagaatcgatatgggaacatcatatcctacgaccattcc

SEQ ID NO: 234 - DNA, 60 bp, Artificial Sequence
  Description of Artificial Sequence: targeting sequence/synthetic sequence
gcacccaaggttaaagatcgaacacacaatgtgactgagaaagtgacccaggttctctct

SEQ ID NO: 235 - DNA, 60 bp, Artificial Sequence
  Description of Artificial Sequence: targeting sequence/synthetic sequence
aacagcatcaacgacagcaagatcctgagcctgcagaacaagaaaaacgccctggtggac

SEQ ID NO: 236 - DNA, 60 bp, Artificial Sequence
  Description of Artificial Sequence: targeting sequence/synthetic sequence
aaggcgctggcggccgcaggctacgacgtggagaagaacaacagccgcattaagctgggc

SEQ ID NO: 237 - DNA, 60 bp, Artificial Sequence
  Description of Artificial Sequence: targeting sequence/synthetic sequence
tccagccgcgtgagtccagggacaagaccaacagctatggggtctttcagctcacacatg

SEQ ID NO: 238 - DNA, 60 bp, Artificial Sequence
  Description of Artificial Sequence: targeting sequence/synthetic sequence
aaggcattggccgctgctggctacgacgtagagaagaataacagccgcatcaaactgtcc

SEQ ID NO: 239 - DNA, 60 bp, Artificial Sequence
  Description of Artificial Sequence: targeting sequence/synthetic sequence
aaagcgttggctgccgccggctatgatgtggagaaaaacaacagccgtatcaaacttggt

SEQ ID NO: 240 - DNA, 60 bp, Artificial Sequence
  Description of Artificial Sequence: targeting sequence/synthetic sequence
atccactacgacggcggagccggcaccaacaccgtgagctacgccgctctgggccggcag

SEQ ID NO: 241 - DNA, 60 bp, Artificial Sequence
  Description of Artificial Sequence: targeting sequence/synthetic sequence
cagaatagaatacgagattcagaatatgaaattcaacgacaagctaaaaaaagtttttca

SEQ ID NO: 242 - DNA, 60 bp, Artificial Sequence
  Description of Artificial Sequence: targeting sequence/synthetic sequence
gccgagcacaacaaggtggtcaccaaggacttcgacgtgatccggaacgtgatcaaggac

SEQ ID NO: 243 - DNA, 60 bp, Artificial Sequence
  Description of Artificial Sequence: targeting sequence/synthetic sequence
aaagtgtttttggagaatgtaatccgcgatgcagttacctacacggagcacgccaaacgc

SEQ ID NO: 244 - DNA, 60 bp, Artificial Sequence
  Description of Artificial Sequence: targeting sequence/synthetic sequence
ctccctggtgttggcctcacaccttcagctgcccagactgcccgtcagcaccccaagatg

SEQ ID NO: 245 - DNA, 60 bp, Artificial Sequence
  Description of Artificial Sequence: targeting sequence/synthetic sequence
cccaaggttaaagatcgaacacacaatgtgactgagaaagtgacccaggttctctcttta

SEQ ID NO: 246 - DNA, 60 bp, Artificial Sequence
  Description of Artificial Sequence: targeting sequence/synthetic sequence
ttcgtgaccaagctgaagcagctggagatgctggagaaccagatcagcaccatccaccag

SEQ ID NO: 247 - DNA, 60 bp, Artificial Sequence
  Description of Artificial Sequence: targeting sequence/synthetic sequence
atcaaggccatcaacaatgccctgaaggagcgggacgagaagtggaaggaggtgtacagc

SEQ ID NO: 248 - DNA, 60 bp, Artificial Sequence
  Description of Artificial Sequence: targeting sequence/synthetic sequence
attgcccgcctggagcagaacgggagcccgctaggaagaggaaggcttgggagtacaggt

SEQ ID NO: 249 - DNA, 60 bp, Artificial Sequence
  Description of Artificial Sequence: targeting sequence/synthetic sequence
gctaaacaaatccaagagcagctgaaagtgccacaaaatggtaaaagctacagtcttaaa

SEQ ID NO: 250 - DNA, 60 bp, Artificial Sequence
  Description of Artificial Sequence: targeting sequence/synthetic sequence
aaccccaactacaaggtgaacgtgtacgccgtgaccaaggagaacaccatcattaacccc

SEQ ID NO: 251 - DNA, 60 bp, Artificial Sequence
  Description of Artificial Sequence: targeting sequence/synthetic sequence
atcacccccgacatcaccagcaaggactgccccaacggccacgtgtgctacaccaagacc

SEQ ID NO: 252 - DNA, 60 bp, Artificial Sequence
  Description of Artificial Sequence: targeting sequence/synthetic sequence
atcattaagaaagccagcaacagccggaacatcaacaatgacaacatcgtgcgggagggc

SEQ ID NO: 253 - DNA, 60 bp, Artificial Sequence
  Description of Artificial Sequence: targeting sequence/synthetic sequence
aagggaggcaacagcagcgtgaagttggaggctggcctggccaacaccatcaccagcttt

SEQ ID NO: 254 - DNA, 60 bp, Artificial Sequence
  Description of Artificial Sequence: targeting sequence/synthetic sequence
ttgcacagtaataagttgactcacacagacttaaagcctgaaaacatcttatttgtgcag

SEQ ID NO: 255 - DNA, 60 bp, Artificial Sequence
  Description of Artificial Sequence: targeting sequence/synthetic sequence
ctcaaccaaccgcatctcaacaaattccgcgacaaccagatcagtacggccaagtacagc

SEQ ID NO: 256 - DNA, 60 bp, Artificial Sequence
  Description of Artificial Sequence: targeting sequence/synthetic sequence
gaaaatgcaatagatggagaacactctggaaaagctactcacgctagaataggtcagata

SEQ ID NO: 257 - DNA, 60 bp, Artificial Sequence
  Description of Artificial Sequence: targeting sequence/synthetic sequence
cgcaagggcaactactccgagcgagtcggggccggcgcgccagtgtatctggcggcggtg

SEQ ID NO: 258 - DNA, 60 bp, Artificial Sequence
  Description of Artificial Sequence: targeting sequence/synthetic sequence
ctcacaggccgacaagatacctctcgcatgtccacctcacagattcctggtcgggtggct

SEQ ID NO: 259 - DNA, 60 bp, Artificial Sequence
  Description of Artificial Sequence: targeting sequence/synthetic sequence
cctcatatgacctcagagaacacagtgctccaagggtataccattcctaaaggcacattg

SEQ ID NO: 260 - DNA, 60 bp, Artificial Sequence
  Description of Artificial Sequence: targeting sequence/synthetic sequence
tatttgcatgaaaacaaaattatacatcgagatctaaaacctgaaaacatagttcttcag

SEQ ID NO: 261 - DNA, 60 bp, Artificial Sequence
  Description of Artificial Sequence: targeting sequence/synthetic sequence
ttcgcccccgccaacacccagaacaataacatcgagggccaggccatcgtgtaccagagc

SEQ ID NO: 262 - DNA, 60 bp, Artificial Sequence
  Description of Artificial Sequence: targeting sequence/synthetic sequence
cgtgaaaatgcaatagatggagaacactctggaaaagctactcacgctagaataggtcag

SEQ ID NO: 263 - DNA, 60 bp, Artificial Sequence
  Description of Artificial Sequence: targeting sequence/synthetic sequence
gagaaaaccatctccaaaaccaaagggcagccccgagaaccacaggtgtacaccctgccc

SEQ ID NO: 264 - DNA, 60 bp, Artificial Sequence
  Description of Artificial Sequence: targeting sequence/synthetic sequence
aacgtgattcgtgacgctgtcacttacacagagcacgccaaacgcaagaccgtgacagca

SEQ ID NO: 265 - DNA, 60 bp, Artificial Sequence
  Description of Artificial Sequence: targeting sequence/synthetic sequence
aaggtgttcctggagaatgtgatacgggacgccgtaacctacacggagcacgccaagcgt

SEQ ID NO: 266 - DNA, 60 bp, Artificial Sequence
  Description of Artificial Sequence: targeting sequence/synthetic sequence
atcaacggcaaggccatccacctggtgaacaatgagagctccgaggtgatcgtgcacaag

SEQ ID NO: 267 - DNA, 60 bp, Artificial Sequence
  Description of Artificial Sequence: targeting sequence/synthetic sequence
ttcaccatcttaagagatgattcgaagaactcagtgcatctccaaatgaacagcctcaaa

SEQ ID NO: 268 - DNA, 60 bp, Artificial Sequence
  Description of Artificial Sequence: targeting sequence/synthetic sequence
ggcattaagagcctggtaagcaagggaacgttggtgcagacaaagggtaccggagcctcg

SEQ ID NO: 269 - DNA, 60 bp, Artificial Sequence
  Description of Artificial Sequence: targeting sequence/synthetic sequence
tcatctcagaatagaatacgagattcagaatatgaaattcaacgacaagctaaaaaaagt

SEQ ID NO: 270 - DNA, 60 bp, Artificial Sequence
  Description of Artificial Sequence: targeting sequence/synthetic sequence
gtggaggtgcacaacgccaagaccaagccccgggaggaacagtacaacagcacctaccgg

SEQ ID NO: 271 - DNA, 60 bp, Artificial Sequence
  Description of Artificial Sequence: targeting sequence/synthetic sequence
atcagcgagggctacaacatcaacaatctgaaggtgaacttccggggccagaacgccaac

SEQ ID NO: 272 - DNA, 60 bp, Artificial Sequence
  Description of Artificial Sequence: targeting sequence/synthetic sequence
gatcgggtgccccactctcggaattccatcaccctcaccaacctcactccaggcacagag

SEQ ID NO: 273 - DNA, 60 bp, Artificial Sequence
  Description of Artificial Sequence: targeting sequence/synthetic sequence
ggcggagtcgcggcagctgtgtccaagacagcggtggcgcccatcgagcgggtgaagctg

SEQ ID NO: 274 - DNA, 60 bp, Artificial Sequence
  Description of Artificial Sequence: targeting sequence/synthetic sequence
gagttagagagacctggtggaaatgagattactcgaggaggctccacctcttatggaacc

SEQ ID NO: 275 - DNA, 60 bp, Artificial Sequence
  Description of Artificial Sequence: targeting sequence/synthetic sequence
atcggcgtgctgggctaccagaagaccgtggaccacaccaaggtgaacagcaagctgagc

SEQ ID NO: 276 - DNA, 60 bp, Artificial Sequence
  Description of Artificial Sequence: targeting sequence/synthetic sequence
accaagccccctgtgcccagcgtgcagaagctggtggaggaccggtggaacaagccccag

SEQ ID NO: 277 - DNA, 60 bp, Artificial Sequence
  Description of Artificial Sequence: targeting sequence/synthetic sequence
atgggcgccggcgtggccggccggatcaccggcagcatgagcctggccagcggcaagagc

SEQ ID NO: 278 - DNA, 60 bp, Artificial Sequence
  Description of Artificial Sequence: targeting sequence/synthetic sequence
gacgccgctgagcacaacaaggtggtcaccaaggacttcgacgtgatccggaacgtgatc

SEQ ID NO: 279 - DNA, 60 bp, Artificial Sequence
  Description of Artificial Sequence: targeting sequence/synthetic sequence
gacgtgatccggaacgtgatcaaggacaacgccaccttcagccggaagaaccccgcctac

SEQ ID NO: 280 - DNA, 60 bp, Artificial Sequence
  Description of Artificial Sequence: targeting sequence/synthetic sequence
ctggagggcaacggcatcgccaccgacgtgcccagcgccaccaagcggtggggcttccgg

SEQ ID NO: 281 - DNA, 60 bp, Artificial Sequence
  Description of Artificial Sequence: targeting sequence/synthetic sequence
gttggtcttcaggttgtggcagtcaaggctccagggtttggtgacaatagaaagaaccag

SEQ ID NO: 282 - DNA, 60 bp, Artificial Sequence
  Description of Artificial Sequence: targeting sequence/synthetic sequence
gtcaacgacattttcgagcgcattgcaggcgaggcttcccgcctggcgcattataacaag

SEQ ID NO: 283 - DNA, 60 bp, Artificial Sequence
  Description of Artificial Sequence: targeting sequence/synthetic sequence
actgttaccagaggagatgctttccttaacaaaaatagtatcttatcaaacatccatgaa

SEQ ID NO: 284 - DNA, 60 bp, Artificial Sequence
  Description of Artificial Sequence: targeting sequence/synthetic sequence
ggatcatctcagaatagaatacgagattcagaatatgaaattcaacgacaagctaaaaaa

SEQ ID NO: 285 - DNA, 60 bp, Artificial Sequence
  Description of Artificial Sequence: targeting sequence/synthetic sequence
agcaaccccaactacaaggtgaacgtgtacgccgtgaccaaggagaacaccatcattaac

SEQ ID NO: 286 - DNA, 60 bp, Artificial Sequence
  Description of Artificial Sequence: targeting sequence/synthetic sequence
caccgtgctgacaagggtactggcagcaatgtcatcctcgtgaggtccaacctgccaggc

SEQ ID NO: 287 - DNA, 60 bp, Artificial Sequence
  Description of Artificial Sequence: targeting sequence/synthetic sequence
gtggtttccagccgcgtgagtccagggacaagaccaacagctatggggtctttcagctca

SEQ ID NO: 288 - DNA, 60 bp, Artificial Sequence
  Description of Artificial Sequence: targeting sequence/synthetic sequence
gataggaaccctagaggctccagcagcagacagagcagcagtagcgctatgtcttcctct

SEQ ID NO: 289 - DNA, 60 bp, Artificial Sequence
  Description of Artificial Sequence: targeting sequence/synthetic sequence
ttccaaggctcaaagagagggctgaactccagttttgaaacctctcctaagaaagtgaaa

SEQ ID NO: 290 - DNA, 60 bp, Artificial Sequence
  Description of Artificial Sequence: targeting sequence/synthetic sequence
tatgatatcaacctggtagagacgagcagtaccagtgcccaccacagtcatgaacaacac

SEQ ID NO: 291 - DNA, 60 bp, Artificial Sequence
  Description of Artificial Sequence: targeting sequence/synthetic sequence
ggcattggcatgaccaaagctgatctcataaataatttgggaaccattgccaagtctggt

SEQ ID NO: 292 - DNA, 60 bp, Artificial Sequence
  Description of Artificial Sequence: targeting sequence/synthetic sequence
ggaacccattgcaaccaagtcgaagtgatagccacactgaaggatgggaggaaaatctgc

SEQ ID NO: 293 - DNA, 60 bp, Artificial Sequence
  Description of Artificial Sequence: targeting sequence/synthetic sequence
agagccagttcagtccagtatgatatcaacctggtagagacgagcagtaccagtgcccac

SEQ ID NO: 294 - DNA, 60 bp, Artificial Sequence
  Description of Artificial Sequence: targeting sequence/synthetic sequence
ttcttccgtgaaaatgcaatagatggagaacactctggaaaagctactcacgctagaata

SEQ ID NO: 295 - DNA, 60 bp, Artificial Sequence
  Description of Artificial Sequence: targeting sequence/synthetic sequence
tacggcggagtgaccgagcacaacggcaaccagctggacaagtaccggagcatcaccgtg

SEQ ID NO: 296 - DNA, 60 bp, Artificial Sequence
  Description of Artificial Sequence: targeting sequence/synthetic sequence
accatctccagagacaactccaagaacacgttgtctctgcaaatgaacagcctgagagtt

SEQ ID NO: 297 - DNA, 60 bp, Artificial Sequence
  Description of Artificial Sequence: targeting sequence/synthetic sequence
tgcaccagccagcacctgctcaaccggaccgtgaccgacaacatgctgtgcgccggcgac

SEQ ID NO: 298 - DNA, 60 bp, Artificial Sequence
  Description of Artificial Sequence: targeting sequence/synthetic sequence
cctagcagtgctggaagctggaactctgggagctctggacctggaagtactggaaaccga

SEQ ID NO: 299 - DNA, 60 bp, Artificial Sequence
  Description of Artificial Sequence: targeting sequence/synthetic sequence
gagaacctggccaagctgatccagcatgccaatgtacaggcgcacagcagcctcatccgt

SEQ ID NO: 300 - DNA, 60 bp, Artificial Sequence
  Description of Artificial Sequence: targeting sequence/synthetic sequence
aacgtgatccgggacgccgtgacctacacggagcacgccaagcgcaagacggtcaccgcc

SEQ ID NO: 301 - DNA, 60 bp, Artificial Sequence
  Description of Artificial Sequence: targeting sequence/synthetic sequence
ctgatccccaccagcggcaccgacaccacagtgaccaagcccaagagccggatcttcggc

SEQ ID NO: 302 - DNA, 60 bp, Artificial Sequence
  Description of Artificial Sequence: targeting sequence/synthetic sequence
cagtcgaagattgggtccctggacaatatcacccacgtccctggcggaggaaataaaaag

SEQ ID NO: 303 - DNA, 60 bp, Artificial Sequence
  Description of Artificial Sequence: targeting sequence/synthetic sequence
gcacggcctgtgacccgaagcccggggggttcccaggagcagcgagccaaaacgccccaa

SEQ ID NO: 304 - DNA, 60 bp, Artificial Sequence
  Description of Artificial Sequence: targeting sequence/synthetic sequence
tatcacagcatgcccacctacctcaacagcctcaacaacgccatcctgcgtgccaacctg

SEQ ID NO: 305 - DNA, 60 bp, Artificial Sequence
  Description of Artificial Sequence: targeting sequence/synthetic sequence
agatttgcaggtattgatggcacctccacatataccagtggtgatcagaaaactataaag

SEQ ID NO: 306 - DNA, 60 bp, Artificial Sequence
  Description of Artificial Sequence: targeting sequence/synthetic sequence
aaggccgggcctgcccagacccttattcggccccaggacatgaagggtgcctctcgaagc

SEQ ID NO: 307 - DNA, 60 bp, Artificial Sequence
  Description of Artificial Sequence: targeting sequence/synthetic sequence
cagaacgggagcccgctaggaagaggaaggcttgggagtacaggtgcaaaaatgcaggga

SEQ ID NO: 308 - DNA, 60 bp, Artificial Sequence
  Description of Artificial Sequence: targeting sequence/synthetic sequence
agaggagatgctttccttaacaaaaatagtatcttatcaaacatccatgaagtacatcag

SEQ ID NO: 309 - DNA, 60 bp, Artificial Sequence
  Description of Artificial Sequence: targeting sequence/synthetic sequence
ctgagccgggtgaacgccgctgtggccaaccgggacagcgccaacggcttcatcaacaag

SEQ ID NO: 310 - DNA, 60 bp, Artificial Sequence
  Description of Artificial Sequence: targeting sequence/synthetic sequence
aacaagaacaccgccctggacaagaactacctgctcaacaataagatccccagcaacaat

SEQ ID NO: 311 - DNA, 60 bp, Artificial Sequence
  Description of Artificial Sequence: targeting sequence/synthetic sequence
aacggcaaggccatccacctggtgaacaatgagagctccgaggtgatcgtgcacaaggcc

SEQ ID NO: 312 - DNA, 60 bp, Artificial Sequence
  Description of Artificial Sequence: targeting sequence/synthetic sequence
accaaagctgatctcataaataatttgggaaccattgccaagtctggtactaaagcattc

SEQ ID NO: 313 - DNA, 60 bp, Artificial Sequence
  Description of Artificial Sequence: targeting sequence/synthetic sequence
gtcaacgatatcttcgagcgcatcgccggcgaggcttcccgcctggctcattacaacaag

SEQ ID NO: 314 - DNA, 60 bp, Artificial Sequence
  Description of Artificial Sequence: targeting sequence/synthetic sequence
aagaacaccgccctggacaagaactacctgctcaacaataagatccccagcaacaatgtg

SEQ ID NO: 315 - DNA, 60 bp, Artificial Sequence
  Description of Artificial Sequence: targeting sequence/synthetic sequence
ctcaaggaggtcctggagtacaatgccattggaggcaagtataaccggggtttgacggtg

SEQ ID NO: 316 - DNA, 60 bp, Artificial Sequence
  Description of Artificial Sequence: targeting sequence/synthetic sequence
agcagtgctggaagctggaactctgggagctctggacctggaagtactggaaaccgaaac

SEQ ID NO: 317 - DNA, 60 bp, Artificial Sequence
  Description of Artificial Sequence: targeting sequence/synthetic sequence
cctgtggtttccagccgcgtgagtccagggacaagaccaacagctatggggtctttcagc

SEQ ID NO: 318 - DNA, 60 bp, Artificial Sequence
  Description of Artificial Sequence: targeting sequence/synthetic sequence
gcagctggcaacctcaagaaggccctgctcatccagggctccaatgacgtggagatccgg

SEQ ID NO: 319 - DNA, 60 bp, Artificial Sequence
  Description of Artificial Sequence: targeting sequence/synthetic sequence
aacgggagcccgctaggaagaggaaggcttgggagtacaggtgcaaaaatgcagggagtg

SEQ ID NO: 320 - DNA, 60 bp, Artificial Sequence
  Description of Artificial Sequence: targeting sequence/synthetic sequence
tcaatgacatattctactgaaagaaagaccaactcacttcctctgcactctgtgaagagc

SEQ ID NO: 321 - DNA, 60 bp, Artificial Sequence
  Description of Artificial Sequence: targeting sequence/synthetic sequence
gggagcccgctaggaagaggaaggcttgggagtacaggtgcaaaaatgcagggagtgcct

SEQ ID NO: 322 - DNA, 60 bp, Artificial Sequence
  Description of Artificial Sequence: targeting sequence/synthetic sequence
ggtcttcaggttgtggcagtcaaggctccagggtttggtgacaatagaaagaaccagctt

SEQ ID NO: 323 - DNA, 60 bp, Artificial Sequence
  Description of Artificial Sequence: targeting sequence/synthetic sequence
caggtggataattatggaacccagctcaatgctgtgaataactccctgactccgcaatca

SEQ ID NO: 324 - DNA, 60 bp, Artificial Sequence
  Description of Artificial Sequence: targeting sequence/synthetic sequence
attgtggccaggccagtgtattctacaaatgcttttgaggaaaatcataaaaagacagga

SEQ ID NO: 325 - DNA, 60 bp, Artificial Sequence
  Description of Artificial Sequence: targeting sequence/synthetic sequence
cccagcgtgcagaagctggtggaggaccggtggaacaagccccagaagaccacaggccac

SEQ ID NO: 326 - DNA, 60 bp, Artificial Sequence
  Description of Artificial Sequence: targeting sequence/synthetic sequence
cactggggccagcgggccctgcagggcgcccaggccgtggccgctgcccagcggctggtg

SEQ ID NO: 327 - DNA, 60 bp, Artificial Sequence
  Description of Artificial Sequence: targeting sequence/synthetic sequence
ggcggcgtcttgcccaatatccaggctgtcctgttgcccaagaaaacggagagtcacaag

SEQ ID NO: 328 - DNA, 60 bp, Artificial Sequence
  Description of Artificial Sequence: targeting sequence/synthetic sequence
gagggctacaacatcaacaatctgaaggtgaacttccggggccagaacgccaacctgaac

SEQ ID NO: 329 - DNA, 60 bp, Artificial Sequence
  Description of Artificial Sequence: targeting sequence/synthetic sequence
agaaagggaggcaacagcagcgtgaagttggaggctggcctggccaacaccatcaccagc

SEQ ID NO: 330 - DNA, 60 bp, Artificial Sequence
  Description of Artificial Sequence: targeting sequence/synthetic sequence
aaggccagcaacagccggaacatcaacaatgacaacatcgtgcgggagggcgactacatc

SEQ ID NO: 331 - DNA, 60 bp, Artificial Sequence
  Description of Artificial Sequence: targeting sequence/synthetic sequence
ttcctggagaacgtgatccgggacgccgtgacctatacagagcacgccaagcgcaagacg

SEQ ID NO: 332 - DNA, 60 bp, Artificial Sequence
  Description of Artificial Sequence: targeting sequence/synthetic sequence
cgcaaaggcaactactccgagcgcgtcggggctggcgcgccggtgtatctcgcggcggtg

SEQ ID NO: 333 - DNA, 60 bp, Artificial Sequence
  Description of Artificial Sequence: targeting sequence/synthetic sequence
aaacaaatccaagagcagctgaaagtgccacaaaatggtaaaagctacagtcttaaagca

SEQ ID NO: 334 - DNA, 60 bp, Artificial Sequence
  Description of Artificial Sequence: targeting sequence/synthetic sequence
ttggccgctgctggctacgacgtagagaagaataacagccgcatcaaactgtccctcaag

SEQ ID NO: 335 - DNA, 60 bp, Artificial Sequence
  Description of Artificial Sequence: targeting sequence/synthetic sequence
agtgggcagggtcagcaggcccaaacccccacaggcaagcaaactgacaaaaccaagagt

SEQ ID NO: 336 - DNA, 60 bp, Artificial Sequence
  Description of Artificial Sequence: targeting sequence/synthetic sequence
cggatccactacgacggcggagccggcaccaacaccgtgagctacgccgctctgggccgg

SEQ ID NO: 337 - DNA, 60 bp, Artificial Sequence
  Description of Artificial Sequence: targeting sequence/synthetic sequence
gcagtggacagtgctgtgtatggagtccaaagaggagccaaaaagcccttggaaagagta

SEQ ID NO: 338 - DNA, 60 bp, Artificial Sequence
  Description of Artificial Sequence: targeting sequence/synthetic sequence
aagccccctgtgcccagcgtgcagaagctggtggaggaccggtggaacaagccccagaag

SEQ ID NO: 339 - DNA, 60 bp, Artificial Sequence
  Description of Artificial Sequence: targeting sequence/synthetic sequence
gctgcacggcctgtgacccgaagcccggggggttcccaggagcagcgagccaaaacgccc

SEQ ID NO: 340 - DNA, 60 bp, Artificial Sequence
  Description of Artificial Sequence: targeting sequence/synthetic sequence
ctacaggggaagccactgcagagctggggacgagggtctgctgggggaaacgcccacagc

SEQ ID NO: 341 - DNA, 60 bp, Artificial Sequence
  Description of Artificial Sequence: targeting sequence/synthetic sequence
actgattatggtaactttttggctaatcacacaaatcctcttactgtttccaaaattgac

SEQ ID NO: 342 - DNA, 60 bp, Artificial Sequence
  Description of Artificial Sequence: targeting sequence/synthetic sequence
cgggtgccccactctcggaattccatcaccctcaccaacctcactccaggcacagagtat

SEQ ID NO: 343 - DNA, 60 bp, Artificial Sequence
  Description of Artificial Sequence: targeting sequence/synthetic sequence
cccggcgggtgccagattagcggacgcggtgcccgcggttgcaacgggatcccgggcgct

SEQ ID NO: 344 - DNA, 60 bp, Artificial Sequence
  Description of Artificial Sequence: targeting sequence/synthetic sequence
aattttttgcacagtaataagttgactcacacagacttaaagcctgaaaacatcttattt

SEQ ID NO: 345 - DNA, 60 bp, Artificial Sequence
  Description of Artificial Sequence: targeting sequence/synthetic sequence
aacctcaagaaggccctgctcatccagggctccaatgacgtggagatccgggcagagggc

SEQ ID NO: 346 - DNA, 60 bp, Artificial Sequence
  Description of Artificial Sequence: targeting sequence/synthetic sequence
aaccagctgctaaaaggagtgaccatcgccagtggaggcgtcctgcccagaattcacccc

SEQ ID NO: 347 - DNA, 60 bp, Artificial Sequence
  Description of Artificial Sequence: targeting sequence/synthetic sequence
cctggtgttggcctcacaccttcagctgcccagactgcccgtcagcaccccaagatgcat

SEQ ID NO: 348 - DNA, 60 bp, Artificial Sequence
  Description of Artificial Sequence: targeting sequence/synthetic sequence
tcgaagattgggtccctggacaatatcacccacgtccctggcggaggaaataaaaagatt

SEQ ID NO: 349 - DNA, 60 bp, Artificial Sequence
  Description of Artificial Sequence: targeting sequence/synthetic sequence
tacgtgcgggacaaggaagtcaactcccaggtctacagccggctcacagcacgaggcaca

SEQ ID NO: 350 - DNA, 60 bp, Artificial Sequence
  Description of Artificial Sequence: targeting sequence/synthetic sequence
ggtgttggcctcacaccttcagctgcccagactgcccgtcagcaccccaagatgcatctt

SEQ ID NO: 351 - DNA, 60 bp, Artificial Sequence
  Description of Artificial Sequence: targeting sequence/synthetic sequence
agggcccggctgctgccccatgccaatgaggtgagccagaagatcggggacaacctgcga

SEQ ID NO: 352 - DNA, 60 bp, Artificial Sequence
  Description of Artificial Sequence: targeting sequence/synthetic sequence
taccacaactacacccagccccgtggcaatttcatcccctacgccaacgaggagcgccgc

SEQ ID NO: 353 - DNA, 60 bp, Artificial Sequence
  Description of Artificial Sequence: targeting sequence/synthetic sequence
caaccgcatctcaacaaattccgcgacaaccagatcagtacggccaagtacagcgtgttg

SEQ ID NO: 354 - DNA, 60 bp, Artificial Sequence
  Description of Artificial Sequence: targeting sequence/synthetic sequence
aaagtaaccatcgctcagggtggtgtcctgcccaacatccaggctgtgctactgcccaag

SEQ ID NO: 355 - DNA, 60 bp, Artificial Sequence
  Description of Artificial Sequence: targeting sequence/synthetic sequence
ggcgggtgccagattagcggacgcggtgcccgcggttgcaacgggatcccgggcgctgca

SEQ ID NO: 356 - DNA, 60 bp, Artificial Sequence
  Description of Artificial Sequence: targeting sequence/synthetic sequence
aacgtgatccgtgacgcggtgacttacacggagcacgccaagcgcaagaccgtcacggcc

SEQ ID NO: 357 - DNA, 60 bp, Artificial Sequence
  Description of Artificial Sequence: targeting sequence/synthetic sequence
agccaaggaaatctcatctttggaaaaggcactaaactctctgttaaaccaaatatccag

SEQ ID NO: 358 - DNA, 60 bp, Artificial Sequence
  Description of Artificial Sequence: targeting sequence/synthetic sequence
gaatctcctggaattgtgtcaaactataacaactccatcttggcaagggtatatcgagat

SEQ ID NO: 359 - DNA, 60 bp, Artificial Sequence
  Description of Artificial Sequence: targeting sequence/synthetic sequence
agcccgctaggaagaggaaggcttgggagtacaggtgcaaaaatgcagggagtgccttta

SEQ ID NO: 360 - DNA, 60 bp, Artificial Sequence
  Description of Artificial Sequence: targeting sequence/synthetic sequence
gtcatcaacaatgccattctccgggccaacctgcaaaagggagagaaccctagccattat

SEQ ID NO: 361 - DNA, 60 bp, Artificial Sequence
  Description of Artificial Sequence: targeting sequence/synthetic sequence
cacggcctgtacggcgccaagggcatcaccacaaagtacaccatcacccagaagcagaac

SEQ ID NO: 362 - DNA, 60 bp, Artificial Sequence
  Description of Artificial Sequence: targeting sequence/synthetic sequence
ctcaacaacgccatcctgcgtgccaacctgcccaagagcaagggcaacccggcggcttac

SEQ ID NO: 363 - DNA, 60 bp, Artificial Sequence
  Description of Artificial Sequence: targeting sequence/synthetic sequence
atcctggagctggcgggcaacgcagcccgcgacaacaaaaagacccgcatcatcccgcgc

SEQ ID NO: 364 - DNA, 60 bp, Artificial Sequence
  Description of Artificial Sequence: targeting sequence/synthetic sequence
aaccctagaggctccagcagcagacagagcagcagtagcgctatgtcttcctcttctgcc

SEQ ID NO: 365 - DNA, 60 bp, Artificial Sequence
  Description of Artificial Sequence: targeting sequence/synthetic sequence
aacaatttcatcgaccggagaaaggacagcaccctgagcatcaacaatatccggagcacc

SEQ ID NO: 366 - DNA, 60 bp, Artificial Sequence
  Description of Artificial Sequence: targeting sequence/synthetic sequence
caccgggactgcgacaagccccctgacaagggcaactgcggccccgtgcggagagccttc

SEQ ID NO: 367 - DNA, 60 bp, Artificial Sequence
  Description of Artificial Sequence: targeting sequence/synthetic sequence
cacagtaataagttgactcacacagacttaaagcctgaaaacatcttatttgtgcagtct

SEQ ID NO: 368 - DNA, 60 bp, Artificial Sequence
  Description of Artificial Sequence: targeting sequence/synthetic sequence
ggaaatctcatctttggaaaaggcactaaactctctgttaaaccaaatatccagaaccct

SEQ ID NO: 369 - DNA, 60 bp, Artificial Sequence
  Description of Artificial Sequence: targeting sequence/synthetic sequence
cgccacttgcagctggccatccgcaacgacgaggagctcaacaagctgcttggtaaagtt

SEQ ID NO: 370 - DNA, 60 bp, Artificial Sequence
  Description of Artificial Sequence: targeting sequence/synthetic sequence
catgccgttggcaaccacaggtcattcagcgacaagaatggcctcaccagcaagcgggag

SEQ ID NO: 371 - DNA, 60 bp, Artificial Sequence
  Description of Artificial Sequence: targeting sequence/synthetic sequence
acaccgcggggagcagcccctccaggccagaagggccaggccaacgccaccaggattcca

SEQ ID NO: 372 - DNA, 60 bp, Artificial Sequence
  Description of Artificial Sequence: targeting sequence/synthetic sequence
gggggcgtcgccgctgccgtctccaagaccgcggtcgcccccatcgagagggtcaaactg

SEQ ID NO: 373 - DNA, 60 bp, Artificial Sequence
  Description of Artificial Sequence: targeting sequence/synthetic sequence
ctgctcatccccaccagcggcaccgacaccacagtgaccaagcccaagagccggatcttc

SEQ ID NO: 374 - DNA, 60 bp, Artificial Sequence
  Description of Artificial Sequence: targeting sequence/synthetic sequence
cgcctggtcaccaccggtgtcctcaagcagaccaaaggggtgggggcctcggggtccttc

SEQ ID NO: 375 - DNA, 60 bp, Artificial Sequence
  Description of Artificial Sequence: targeting sequence/synthetic sequence
gtgaccattgctcagggcggcgtccttcctaacatccaggccgtgcttctgcctaagaag

SEQ ID NO: 376 - DNA, 60 bp, Artificial Sequence
  Description of Artificial Sequence: targeting sequence/synthetic sequence
gtgaccaagctgaccgaggaccggtggaacgagcggcagaagacccagggccaccggggc

SEQ ID NO: 377 - DNA, 60 bp, Artificial Sequence
  Description of Artificial Sequence: targeting sequence/synthetic sequence
cggaaggtgatcaaggacaacgccaccttcagcaccaagaaccccgcctaccccatcagc

SEQ ID NO: 378 - DNA, 60 bp, Artificial Sequence
  Description of Artificial Sequence: targeting sequence/synthetic sequence
gttaccagaggagatgctttccttaacaaaaatagtatcttatcaaacatccatgaagta

SEQ ID NO: 379 - DNA, 60 bp, Artificial Sequence
  Description of Artificial Sequence: targeting sequence/synthetic sequence
ctctatgtggggaaaaagcagcttgtagagattgagaaggttgttctacaccctaactac

SEQ ID NO: 380 - DNA, 60 bp, Artificial Sequence
  Description of Artificial Sequence: targeting sequence/synthetic sequence
ctccagactactgattatggtaactttttggctaatcacacaaatcctcttactgtttcc

SEQ ID NO: 381 - DNA, 60 bp, Artificial Sequence
  Description of Artificial Sequence: targeting sequence/synthetic sequence
gtcaccattgcccagggcggcgtcttgcccaatatccaggctgtcctgttgcccaagaaa

SEQ ID NO: 382 - DNA, 60 bp, Artificial Sequence
  Description of Artificial Sequence: targeting sequence/synthetic sequence
cacagcatgcccacctacctcaacagcctcaacaacgccatcctgcgtgccaacctgccc

SEQ ID NO: 383 - DNA, 60 bp, Artificial Sequence
  Description of Artificial Sequence: targeting sequence/synthetic sequence
agcatccaccgtgctgacaagggtactggcagcaatgtcatcctcgtgaggtccaacctg

SEQ ID NO: 384 - DNA, 60 bp, Artificial Sequence
  Description of Artificial Sequence: targeting sequence/synthetic sequence
acaattgtcaccaggatcaatgacatttcacacacgcagtcagtctcctccaaacagaaa

SEQ ID NO: 385 - DNA, 60 bp, Artificial Sequence
  Description of Artificial Sequence: targeting sequence/synthetic sequence
gctggcaaagaaggcggcaaaggtccccgtggtgagactggccctgctggacgtcctggt

SEQ ID NO: 386 - DNA, 60 bp, Artificial Sequence
  Description of Artificial Sequence: targeting sequence/synthetic sequence
ctccgcaaaggcaactactccgaacgagtcggggccggcgctccagtgtacctggcagcg

SEQ ID NO: 387 - DNA, 60 bp, Artificial Sequence
  Description of Artificial Sequence: targeting sequence/synthetic sequence
atttacctcaaccaaccgcatctcaacaaattccgcgacaaccagatcagtacggccaag

SEQ ID NO: 388 - DNA, 60 bp, Artificial Sequence
  Description of Artificial Sequence: targeting sequence/synthetic sequence
cagccccgtggcaatttcatcccctacgccaacgaggagcgccgcgagtaccggctgcgg

SEQ ID NO: 389 - DNA, 60 bp, Artificial Sequence
  Description of Artificial Sequence: targeting sequence/synthetic sequence
gtaagggcatccttggcagaagagaccagaggggcaagaaagggatacccagcctctccc

SEQ ID NO: 390 - DNA, 60 bp, Artificial Sequence
  Description of Artificial Sequence: targeting sequence/synthetic sequence
aaactgctaggccgggtgaccattgctcagggcggcgtccttcctaacatccaggccgtg

SEQ ID NO: 391 - DNA, 60 bp, Artificial Sequence
  Description of Artificial Sequence: targeting sequence/synthetic sequence
aacttcatcgaccggagaaaggacagcaccctgagcatcaacaatatccggagcaccatc

SEQ ID NO: 392 - DNA, 60 bp, Artificial Sequence
  Description of Artificial Sequence: targeting sequence/synthetic sequence
cgtcatctccaactggccatccgcaacgacgaggagctcaacaagctgctgggcaaagtc

SEQ ID NO: 393 - DNA, 60 bp, Artificial Sequence
  Description of Artificial Sequence: targeting sequence/synthetic sequence
ggcaccaagcccggctacgtggacagcatccagaagggcatccagaagcccaagagcggc

SEQ ID NO: 394 - DNA, 60 bp, Artificial Sequence
  Description of Artificial Sequence: targeting sequence/synthetic sequence
aacaagctggccaccaacctgatcaagagcggcgtggccaccaagggcctgaacgtgcac

SEQ ID NO: 395 - DNA, 60 bp, Artificial Sequence
  Description of Artificial Sequence: targeting sequence/synthetic sequence
atcaagaccatcgacaacgccctgaccaagcggaacgagaagtggagcgacatgtacggc

SEQ ID NO: 396 - DNA, 60 bp, Artificial Sequence
  Description of Artificial Sequence: targeting sequence/synthetic sequence
ggcgttttgcctaacatccaggccgttctgttaccaaagaaaaccgaaagccacaaagcc

SEQ ID NO: 397 - DNA, 60 bp, Artificial Sequence
  Description of Artificial Sequence: targeting sequence/synthetic sequence
ggcgtgaccgagcacaacggcaaccagctggacaagtaccggagcatcaccgtgcgggtg

SEQ ID NO: 398 - DNA, 60 bp, Artificial Sequence
  Description of Artificial Sequence: targeting sequence/synthetic sequence
atctccaaaaccaaaggacagccccgagaaccacaggtgtacaccctgcccccatcccgg

SEQ ID NO: 399 - DNA, 60 bp, Artificial Sequence
  Description of Artificial Sequence: targeting sequence/synthetic sequence
gtttccagccgcgtgagtccagggacaagaccaacagctatggggtctttcagctcacac

SEQ ID NO: 400 - DNA, 60 bp, Artificial Sequence
  Description of Artificial Sequence: targeting sequence/synthetic sequence
ctgtacggcgccaagggcatcaccacaaagtacaccatcacccagaagcagaaccccctg

SEQ ID NO: 401 - DNA, 60 bp, Artificial Sequence
  Description of Artificial Sequence: targeting sequence/synthetic sequence
aagatcgccacaccgcggggagcagcccctccaggccagaagggccaggccaacgccacc

SEQ ID NO: 402 - DNA, 60 bp, Artificial Sequence
  Description of Artificial Sequence: targeting sequence/synthetic sequence
cagagctggggacgagggtctgctgggggaaacgcccacagcccactgggggtgcctgga

SEQ ID NO: 403 - DNA, 60 bp, Artificial Sequence
  Description of Artificial Sequence: targeting sequence/synthetic sequence
tcacagatgcagtctcaagctggtggaaacaatactggttcaactccactaagaaaagcc

SEQ ID NO: 404 - DNA, 60 bp, Artificial Sequence
  Description of Artificial Sequence: targeting sequence/synthetic sequence
gatgaaaaccgcaataagaatcgatatgggaacatcatatcctacgaccattcccgggtg

SEQ ID NO: 405 - DNA, 60 bp, Artificial Sequence
  Description of Artificial Sequence: targeting sequence/synthetic sequence
gaatccaacaatgtgatcactttcaatggcttggccaacagctccagttatcataccttc

SEQ ID NO: 406 - DNA, 60 bp, Artificial Sequence
  Description of Artificial Sequence: targeting sequence/synthetic sequence
aagaccaagccccctgtgcccagcgtgcagaagctggtggaggaccggtggaacaagccc

SEQ ID NO: 407 - DNA, 60 bp, Artificial Sequence
  Description of Artificial Sequence: targeting sequence/synthetic sequence
cagatggagtcaatgacatattctactgaaagaaagaccaactcacttcctctgcactct

SEQ ID NO: 408 - DNA, 60 bp, Artificial Sequence
  Description of Artificial Sequence: targeting sequence/synthetic sequence
ggtgccattctctcatctaccaacgtgggatccaatacatatggcaagaggaatgcagta

SEQ ID NO: 409 - DNA, 60 bp, Artificial Sequence
  Description of Artificial Sequence: targeting sequence/synthetic sequence
tatctgatgggaatgggcaatgaaatagacttacacactgtacattttcacggccatagc

SEQ ID NO: 410 - DNA, 60 bp, Artificial Sequence
  Description of Artificial Sequence: targeting sequence/synthetic sequence
gtgcgggacaaggaagtcaactcccaggtctacagccggctcacagcacgaggcacagtg

SEQ ID NO: 411 - DNA, 60 bp, Artificial Sequence
  Description of Artificial Sequence: targeting sequence/synthetic sequence
ctgccctttgataatatcgtggggaaacagaatactctggctgccctaacaagaaattca

SEQ ID NO: 412 - DNA, 60 bp, Artificial Sequence
  Description of Artificial Sequence: targeting sequence/synthetic sequence
caaggaaatctcatctttggaaaaggcactaaactctctgttaaaccaaatatccagaac

SEQ ID NO: 413 - DNA, 60 bp, Artificial Sequence
  Description of Artificial Sequence: targeting sequence/synthetic sequence
ctggctaagataccttctgaaaataacaaactaacgtactcacatggcaattatttgttt

SEQ ID NO: 414 - DNA, 60 bp, Artificial Sequence
  Description of Artificial Sequence: targeting sequence/synthetic sequence
actactgattatggtaactttttggctaatcacacaaatcctcttactgtttccaaaatt

SEQ ID NO: 415 - DNA, 60 bp, Artificial Sequence
  Description of Artificial Sequence: targeting sequence/synthetic sequence
gacaaggaagtcaactcccaggtctacagccggctcacagcacgaggcacagtgaaggtg

SEQ ID NO: 416 - DNA, 60 bp, Artificial Sequence
  Description of Artificial Sequence: targeting sequence/synthetic sequence
gaagcaaacatccgaggacaaggtggcttggcctacccaggtgtgcggacccatgggact

SEQ ID NO: 417 - DNA, 60 bp, Artificial Sequence
  Description of Artificial Sequence: targeting sequence/synthetic sequence
aaagtgaccatcgctcagggcggcgtcctgcccaacatccaggccgtgctgctgcccaag

SEQ ID NO: 418 - DNA, 60 bp, Artificial Sequence
  Description of Artificial Sequence: targeting sequence/synthetic sequence
agccgcgtgagtccagggacaagaccaacagctatggggtctttcagctcacacatgaca

SEQ ID NO: 419 - DNA, 60 bp, Artificial Sequence
  Description of Artificial Sequence: targeting sequence/synthetic sequence
tttttcttccgtgaaaatgcaatagatggagaacactctggaaaagctactcacgctaga

SEQ ID NO: 420 - DNA, 60 bp, Artificial Sequence
  Description of Artificial Sequence: targeting sequence/synthetic sequence
ggcccacatgccgttggcaaccacaggtcattcagcgacaagaatggcctcaccagcaag

SEQ ID NO: 421 - DNA, 60 bp, Artificial Sequence
  Description of Artificial Sequence: targeting sequence/synthetic sequence
ggcgtgctgggctaccagaagaccgtggaccacaccaaggtgaacagcaagctgagcctg

SEQ ID NO: 422 - DNA, 60 bp, Artificial Sequence
  Description of Artificial Sequence: targeting sequence/synthetic sequence
cagttaataactaatagtgtggagatgcatgcctatactgtccagcgcctgtacaaagca

SEQ ID NO: 423 - DNA, 60 bp, Artificial Sequence
  Description of Artificial Sequence: targeting sequence/synthetic sequence
aaggtgttcctggagaatgtgattcgggacgcagtcacctacaccgagcacgccaagcgc

SEQ ID NO: 424 - DNA, 60 bp, Artificial Sequence
  Description of Artificial Sequence: targeting sequence/synthetic sequence
agctccaagagcaccatcttcagcggcaacggccggaacgtggtcgtggagcccatctac

SEQ ID NO: 425 - DNA, 60 bp, Artificial Sequence
  Description of Artificial Sequence: targeting sequence/synthetic sequence
accaacctgatcaagagcggcgtggccaccaagggcctgaacgtgcacggcaagagctcc

SEQ ID NO: 426 - DNA, 60 bp, Artificial Sequence
  Description of Artificial Sequence: targeting sequence/synthetic sequence
agctcctacaccacactgcagcgggtggccggcatcagccggaccggcatgcagatcaac

SEQ ID NO: 427 - DNA, 60 bp, Artificial Sequence
  Description of Artificial Sequence: targeting sequence/synthetic sequence
caaggctcaaagagagggctgaactccagttttgaaacctctcctaagaaagtgaaatgg

SEQ ID NO: 428 - DNA, 60 bp, Artificial Sequence
  Description of Artificial Sequence: targeting sequence/synthetic sequence
aagatcagctccagcggcaaccggttcaaccaggtggtcgtgatgaacagcgtgggcaac

SEQ ID NO: 429 - DNA, 60 bp, Artificial Sequence
  Description of Artificial Sequence: targeting sequence/synthetic sequence
accaaggacttcgacgtgatccggaacgtgatcaaggacaacgccaccttcagccggaag

SEQ ID NO: 430 - DNA, 60 bp, Artificial Sequence
  Description of Artificial Sequence: targeting sequence/synthetic sequence
ggagcagcccctccaggccagaagggccaggccaacgccaccaggattccagcaaaaacc

SEQ ID NO: 431 - DNA, 60 bp, Artificial Sequence
  Description of Artificial Sequence: targeting sequence/synthetic sequence
aacgccatcctgcgtgccaacctgcccaagagcaagggcaacccggcggcttacggcatc

SEQ ID NO: 432 - DNA, 60 bp, Artificial Sequence
  Description of Artificial Sequence: targeting sequence/synthetic sequence
aacctggccaagctgatccagcatgccaatgtacaggcgcacagcagcctcatccgtaac

SEQ ID NO: 433 - DNA, 60 bp, Artificial Sequence
  Description of Artificial Sequence: targeting sequence/synthetic sequence
ggccagcgggccctgcagggcgcccaggccgtggccgctgcccagcggctggtgcacgcc

SEQ ID NO: 434 - DNA, 60 bp, Artificial Sequence
  Description of Artificial Sequence: targeting sequence/synthetic sequence
taccacggcaccaagcccggctacgtggacagcatccagaagggcatccagaagcccaag

SEQ ID NO: 435 - DNA, 60 bp, Artificial Sequence
  Description of Artificial Sequence: targeting sequence/synthetic sequence
cgcaaaggcaactactccgaacgagtcggggccggcgctccagtgtacctggcagcggtg

SEQ ID NO: 436 - DNA, 60 bp, Artificial Sequence
  Description of Artificial Sequence: targeting sequence/synthetic sequence
ggcgtggccggccggatcaccggcagcatgagcctggccagcggcaagagcctgctccac

SEQ ID NO: 437 - DNA, 60 bp, Artificial Sequence
  Description of Artificial Sequence: targeting sequence/synthetic sequence
caggggaagccactgcagagctggggacgagggtctgctgggggaaacgcccacagccca

SEQ ID NO: 438 - DNA, 60 bp, Artificial Sequence
  Description of Artificial Sequence: targeting sequence/synthetic sequence
acccccgacatcaccagcaaggactgccccaacggccacgtgtgctacaccaagacctgg

SEQ ID NO: 439 - DNA, 60 bp, Artificial Sequence
  Description of Artificial Sequence: targeting sequence/synthetic sequence
aagctctataagacatatgctaccaaggaagggattcctaaatccaatagaagtcacctc

SEQ ID NO: 440 - DNA, 60 bp, Artificial Sequence
  Description of Artificial Sequence: targeting sequence/synthetic sequence
aaagtcaccatcgcgcagggtggtgtcttgcccaatatccaggccgtgctgctgcctaag

SEQ ID NO: 441 - DNA, 60 bp, Artificial Sequence
  Description of Artificial Sequence: targeting sequence/synthetic sequence
ctgtccaccaacaagctggagaaccagctgctgctacagaggcagaagctccagcagctt

SEQ ID NO: 442 - DNA, 60 bp, Artificial Sequence
  Description of Artificial Sequence: targeting sequence/synthetic sequence
ctcaacgagttccgctttagccaagtctccaagaatgacctgtatcatgctggggagctg

SEQ ID NO: 443 - DNA, 60 bp, Artificial Sequence
  Description of Artificial Sequence: targeting sequence/synthetic sequence
gagaagggaagccagctggctgcgggacagaaacaacgtctggccattgcccgggccctt

SEQ ID NO: 444 - DNA, 60 bp, Artificial Sequence
  Description of Artificial Sequence: targeting sequence/synthetic sequence
tattctactgaaagaaagaccaactcacttcctctgcactctgtgaagagcatcaagtca

SEQ ID NO: 445 - DNA, 60 bp, Artificial Sequence
  Description of Artificial Sequence: targeting sequence/synthetic sequence
gcccataaagtggagcacgaaagcaggacccagaatgggaggagcttccagaggaccgga

SEQ ID NO: 446 - DNA, 60 bp, Artificial Sequence
  Description of Artificial Sequence: targeting sequence/synthetic sequence
ggcatcaccaagcccgccatccgacgcctggcacggcgtggaggcgttaagcgcatctca

SEQ ID NO: 447 - DNA, 60 bp, Artificial Sequence
  Description of Artificial Sequence: targeting sequence/synthetic sequence
aaggaggtcctggagtacaatgccattggaggcaagtataaccggggtttgacggtggta

SEQ ID NO: 448 - DNA, 60 bp, Artificial Sequence
  Description of Artificial Sequence: targeting sequence/synthetic sequence
gccacaaatcagtttggcactgcaaagaacactggcagcctcattgtaaaagagagaact

SEQ ID NO: 449 - DNA, 60 bp, Artificial Sequence
  Description of Artificial Sequence: targeting sequence/synthetic sequence
tacggcgccaagggcatcaccacaaagtacaccatcacccagaagcagaaccccctgatc

SEQ ID NO: 450 - DNA, 60 bp, Artificial Sequence
  Description of Artificial Sequence: targeting sequence/synthetic sequence
accatcgctcagggcggcgtcctgcccaacatccaggccgtgctgctgcccaagaagacg

SEQ ID NO: 451 - DNA, 60 bp, Artificial Sequence
  Description of Artificial Sequence: targeting sequence/synthetic sequence
ccctttgataatatcgtggggaaacagaatactctggctgccctaacaagaaattcaata

SEQ ID NO: 452 - DNA, 60 bp, Artificial Sequence
  Description of Artificial Sequence: targeting sequence/synthetic sequence
agcgtgaccaagctgaccgaggaccggtggaacgagcggcagaagacccagggccaccgg

SEQ ID NO: 453 - DNA, 60 bp, Artificial Sequence
  Description of Artificial Sequence: targeting sequence/synthetic sequence
cagtatattgtggccaggccagtgtattctacaaatgcttttgaggaaaatcataaaaag

SEQ ID NO: 454 - DNA, 60 bp, Artificial Sequence
  Description of Artificial Sequence: targeting sequence/synthetic sequence
cagaagcagctactcaatgagaacaacaacacaggaatcatcaagggtcattacaaccgg

SEQ ID NO: 455 - DNA, 60 bp, Artificial Sequence
  Description of Artificial Sequence: targeting sequence/synthetic sequence
aataacatgatccagaccaagccaacaggaacccagcaatcgaccaatacagctgtgact

SEQ ID NO: 456 - DNA, 60 bp, Artificial Sequence
  Description of Artificial Sequence: targeting sequence/synthetic sequence
atccggaaggtgatcaaggacaacgccaccttcagcaccaagaaccccgcctaccccatc

SEQ ID NO: 457 - DNA, 60 bp, Artificial Sequence
  Description of Artificial Sequence: targeting sequence/synthetic sequence
aaggccatcaacaatgccctgaaggagcgggacgagaagtggaaggaggtgtacagcttc

SEQ ID NO: 458 - DNA, 60 bp, Artificial Sequence
  Description of Artificial Sequence: targeting sequence/synthetic sequence
atccaccgtgctgacaagggtactggcagcaatgtcatcctcgtgaggtccaacctgcca

SEQ ID NO: 459 - DNA, 60 bp, Artificial Sequence
  Description of Artificial Sequence: targeting sequence/synthetic sequence
attggccatttgttgaaggataaatatgaaaacagtatccagatatcagacaaaacaaag

SEQ ID NO: 460 - DNA, 60 bp, Artificial Sequence
  Description of Artificial Sequence: targeting sequence/synthetic sequence
aacatcaacaatctgaaggtgaacttccggggccagaacgccaacctgaacccccggatc

SEQ ID NO: 461 - DNA, 60 bp, Artificial Sequence
  Description of Artificial Sequence: targeting sequence/synthetic sequence
aagaccaagccccctctgcccagcgtgcagaagctggtggaggaccggtggaacaagccc

SEQ ID NO: 462 - DNA, 60 bp, Artificial Sequence
  Description of Artificial Sequence: targeting sequence/synthetic sequence
aggcagaagcagctactcaatgagaacaacaacacaggaatcatcaagggtcattacaac

SEQ ID NO: 463 - DNA, 60 bp, Artificial Sequence
  Description of Artificial Sequence: targeting sequence/synthetic sequence
aagctgctgggccgcgtgaccatcgcgcagggtggcgtcctgcccaacatccaggccgta

SEQ ID NO: 464 - DNA, 60 bp, Artificial Sequence
  Description of Artificial Sequence: targeting sequence/synthetic sequence
aagccactgcagagctggggacgagggtctgctgggggaaacgcccacagcccactgggg

SEQ ID NO: 465 - DNA, 60 bp, Artificial Sequence
  Description of Artificial Sequence: targeting sequence/synthetic sequence
acgaagatcgccacaccgcggggagcagcccctccaggccagaagggccaggccaacgcc

SEQ ID NO: 466 - DNA, 60 bp, Artificial Sequence
  Description of Artificial Sequence: targeting sequence/synthetic sequence
atagccacaaatcagtttggcactgcaaagaacactggcagcctcattgtaaaagagaga

SEQ ID NO: 467 - DNA, 60 bp, Artificial Sequence
  Description of Artificial Sequence: targeting sequence/synthetic sequence
accaacaaggagaagaccatcaagatcagctccagcggcaaccggttcaaccaggtggtc

SEQ ID NO: 468 - DNA, 60 bp, Artificial Sequence
  Description of Artificial Sequence: targeting sequence/synthetic sequence
accactgttaccagaggagatgctttccttaacaaaaatagtatcttatcaaacatccat

SEQ ID NO: 469 - DNA, 60 bp, Artificial Sequence
  Description of Artificial Sequence: targeting sequence/synthetic sequence
ctggctggctccctacaggggaagccactgcagagctggggacgagggtctgctggggga

SEQ ID NO: 470 - DNA, 60 bp, Artificial Sequence
  Description of Artificial Sequence: targeting sequence/synthetic sequence
aacaagcggaaggagcagatgtaccaggccctgcagaaccaggtgaacgccatcaagacc

SEQ ID NO: 471 - DNA, 60 bp, Artificial Sequence
  Description of Artificial Sequence: targeting sequence/synthetic sequence
aacacccagttcaacaagcggaaggagcagatgtaccaggccctgcagaaccaggtgaac

SEQ ID NO: 472 - DNA, 60 bp, Artificial Sequence
  Description of Artificial Sequence: targeting sequence/synthetic sequence
cggctcaaggaggtcctggagtacaatgccattggaggcaagtataaccggggtttgacg

SEQ ID NO: 473 - DNA, 60 bp, Artificial Sequence
  Description of Artificial Sequence: targeting sequence/synthetic sequence
ttcggcagcgacagcaaggccgtgaccggcctgcggaccatcgacggcaagaaatactat

SEQ ID NO: 474 - DNA, 60 bp, Artificial Sequence
  Description of Artificial Sequence: targeting sequence/synthetic sequence
atgaaagaagcaaacatccgaggacaaggtggcttggcctacccaggtgtgcggacccat

SEQ ID NO: 475 - DNA, 60 bp, Artificial Sequence
  Description of Artificial Sequence: targeting sequence/synthetic sequence
tccaccaacaagctggagaaccagctgctgctacagaggcagaagctccagcagcttcag

SEQ ID NO: 476 - DNA, 60 bp, Artificial Sequence
  Description of Artificial Sequence: targeting sequence/synthetic sequence
gggagacctcgagaagatcgggtgccccactctcggaattccatcaccctcaccaacctc

SEQ ID NO: 477 - DNA, 60 bp, Artificial Sequence
  Description of Artificial Sequence: targeting sequence/synthetic sequence
agggcatccttggcagaagagaccagaggggcaagaaagggatacccagcctctcccaat

SEQ ID NO: 478 - DNA, 60 bp, Artificial Sequence
  Description of Artificial Sequence: targeting sequence/synthetic sequence
cataaagtggagcacgaaagcaggacccagaatgggaggagcttccagaggaccggaaca

SEQ ID NO: 479 - DNA, 60 bp, Artificial Sequence
  Description of Artificial Sequence: targeting sequence/synthetic sequence
aagcccaacaatttcatcgaccggagaaaggacagcaccctgagcatcaacaatatccgg

SEQ ID NO: 480 - DNA, 60 bp, Artificial Sequence
  Description of Artificial Sequence: targeting sequence/synthetic sequence
gcattagcagcagtggacagtgctgtgtatggagtccaaagaggagccaaaaagcccttg

SEQ ID NO: 481 - DNA, 60 bp, Artificial Sequence
  Description of Artificial Sequence: targeting sequence/synthetic sequence
tccctacaggggaagccactgcagagctggggacgagggtctgctgggggaaacgcccac

SEQ ID NO: 482 - DNA, 60 bp, Artificial Sequence
  Description of Artificial Sequence: targeting sequence/synthetic sequence
acccagttcaacaagcggaaggagcagatgtaccaggccctgcagaaccaggtgaacgcc

SEQ ID NO: 483 - DNA, 60 bp, Artificial Sequence
  Description of Artificial Sequence: targeting sequence/synthetic sequence
ggccatttgttgaaggataaatatgaaaacagtatccagatatcagacaaaacaaagagg

SEQ ID NO: 484 - DNA, 60 bp, Artificial Sequence
  Description of Artificial Sequence: targeting sequence/synthetic sequence
aacaagcggaaggagcagatgtaccaggccctgcagaaccaggtgaacgccctgaaggcc

SEQ ID NO: 485 - DNA, 60 bp, Artificial Sequence
  Description of Artificial Sequence: targeting sequence/synthetic sequence
agtgggagacctcgagaagatcgggtgccccactctcggaattccatcaccctcaccaac

SEQ ID NO: 486 - DNA, 60 bp, Artificial Sequence
  Description of Artificial Sequence: targeting sequence/synthetic sequence
gcaaacatccgaggacaaggtggcttggcctacccaggtgtgcggacccatgggactctg

SEQ ID NO: 487 - DNA, 60 bp, Artificial Sequence
  Description of Artificial Sequence: targeting sequence/synthetic sequence
cggagacggttcgtgcagaacgccctgaacggcaacggcgacagcaacaatatggaccgg

SEQ ID NO: 488 - DNA, 60 bp, Artificial Sequence
  Description of Artificial Sequence: targeting sequence/synthetic sequence
accaggatcaatgacatttcacacacgcagtcagtctcctccaaacagaaagtcaccggt

SEQ ID NO: 489 - DNA, 60 bp, Artificial Sequence
  Description of Artificial Sequence: targeting sequence/synthetic sequence
acccattgcaaccaagtcgaagtgatagccacactgaaggatgggaggaaaatctgcctg

SEQ ID NO: 490 - DNA, 60 bp, Artificial Sequence
  Description of Artificial Sequence: targeting sequence/synthetic sequence
cagatgccagagacctttctgtccaccaacaagctggagaaccagctgctgctacagagg

SEQ ID NO: 491 - DNA, 60 bp, Artificial Sequence
  Description of Artificial Sequence: targeting sequence/synthetic sequence
agccggtgcaccagccagcacctgctcaaccggaccgtgaccgacaacatgctgtgcgcc

SEQ ID NO: 492 - DNA, 60 bp, Artificial Sequence
  Description of Artificial Sequence: targeting sequence/synthetic sequence
tgggatgtggatattgcaaacaaactcgaatctggaggaatccctgggaggattcacatt

SEQ ID NO: 493 - DNA, 60 bp, Artificial Sequence
  Description of Artificial Sequence: targeting sequence/synthetic sequence
gctaagataccttctgaaaataacaaactaacgtactcacatggcaattatttgtttcat

SEQ ID NO: 494 - DNA, 60 bp, Artificial Sequence
  Description of Artificial Sequence: targeting sequence/synthetic sequence
accctcaagagcctgagccagcagatcgagaacatccggagcccagagggcagccgcaag

SEQ ID NO: 495 - DNA, 60 bp, Artificial Sequence
  Description of Artificial Sequence: targeting sequence/synthetic sequence
atgggcaatgaaatagacttacacactgtacattttcacggccatagcttccaatacaag

SEQ ID NO: 496 - DNA, 60 bp, Artificial Sequence
  Description of Artificial Sequence: targeting sequence/synthetic sequence
ggcaacagcattgggattggagaaccaagtgaaccatcagaattgttaagaactaaagca

SEQ ID NO: 497 - DNA, 60 bp, Artificial Sequence
  Description of Artificial Sequence: targeting sequence/synthetic sequence
ggtattgatggcacctccacatataccagtggtgatcagaaaactataaagtccactagg

SEQ ID NO: 498 - DNA, 60 bp, Artificial Sequence
  Description of Artificial Sequence: targeting sequence/synthetic sequence
ctgcgcggtgtcaggcacaactccagcctcctgcaggaccagcagcacagcctgcgccag

SEQ ID NO: 499 - DNA, 60 bp, Artificial Sequence
  Description of Artificial Sequence: targeting sequence/synthetic sequence
aagcggaaggagcagatgtaccaggccctgcagaaccaggtgaacgccctgaaggccatc

SEQ ID NO: 500 - DNA, 60 bp, Artificial Sequence
  Description of Artificial Sequence: targeting sequence/synthetic sequence
ctcaatggcttccggttctccaggctcaccaccaacgacctgtaccatgctggggagctg

SEQ ID NO: 501 - DNA, 60 bp, Artificial Sequence
  Description of Artificial Sequence: targeting sequence/synthetic sequence
gtctggtcttgggatgtggatattgcaaacaaactcgaatctggaggaatccctgggagg

SEQ ID NO: 502 - DNA, 60 bp, Artificial Sequence
  Description of Artificial Sequence: targeting sequence/synthetic sequence
ttcaacatcggcaacctggccgtgaacaatcggggccagagcatcaagctgaaccccaag

SEQ ID NO: 503 - DNA, 60 bp, Artificial Sequence
  Description of Artificial Sequence: targeting sequence/synthetic sequence
ttccgctttagccaagtctccaagaatgacctgtatcatgctggggagctgctggccctg

SEQ ID NO: 504 - DNA, 60 bp, Artificial Sequence
  Description of Artificial Sequence: targeting sequence/synthetic sequence
ttcgacgtgatccggaacgtgatcaaggacaacgccaccttcagccggaagaaccccgcc

SEQ ID NO: 505 - DNA, 60 bp, Artificial Sequence
  Description of Artificial Sequence: targeting sequence/synthetic sequence
cctcagggtgctcgaggattgcccggaacagctggcctccctggaatgaagggacacaga

SEQ ID NO: 506 - DNA, 60 bp, Artificial Sequence
  Description of Artificial Sequence: targeting sequence/synthetic sequence
aagaagctctataagacatatgctaccaaggaagggattcctaaatccaatagaagtcac

SEQ ID NO: 507 - DNA, 60 bp, Artificial Sequence
  Description of Artificial Sequence: targeting sequence/synthetic sequence
cgcggtgtcaggcacaactccagcctcctgcaggaccagcagcacagcctgcgccagctg

SEQ ID NO: 508 - DNA, 60 bp, Artificial Sequence
  Description of Artificial Sequence: targeting sequence/synthetic sequence
aactttggtgccattctctcatctaccaacgtgggatccaatacatatggcaagaggaat

SEQ ID NO: 509 - DNA, 60 bp, Artificial Sequence
  Description of Artificial Sequence: targeting sequence/synthetic sequence
gagaagaccatcaagatcagctccagcggcaaccggttcaaccaggtggtcgtgatgaac

SEQ ID NO: 510 - DNA, 60 bp, Artificial Sequence
  Description of Artificial Sequence: targeting sequence/synthetic sequence
ggcagcgacagcaaggccgtgaccggcctgcggaccatcgacggcaagaaatactatttc

SEQ ID NO: 511 - DNA, 60 bp, Artificial Sequence
  Description of Artificial Sequence: targeting sequence/synthetic sequence
ggtgaacggggcactaccctgtctgggggccagaagcagcgcctggccatcgcccgagcc

SEQ ID NO: 512 - DNA, 60 bp, Artificial Sequence
  Description of Artificial Sequence: targeting sequence/synthetic sequence
gccaaaaaggctggcgcagccaagcctaggaagcctgctggggcagccaagaagcccaag

SEQ ID NO: 513 - DNA, 60 bp, Artificial Sequence
  Description of Artificial Sequence: targeting sequence/synthetic sequence
cgtgacaaggaagtgaattcacaactatatagcaagcttacagtaagaggtaaagtgcaa

SEQ ID NO: 514 - DNA, 60 bp, Artificial Sequence
  Description of Artificial Sequence: targeting sequence/synthetic sequence
aaggccgctaagaaagccaaggccgctaagaaagccaaggccgctaagaaagccaaggcc

SEQ ID NO: 515 - DNA, 60 bp, Artificial Sequence
  Description of Artificial Sequence: targeting sequence/synthetic sequence
cacctgcagctggccatccgcaacgacgaggagctcaacaagctgctgggccgcgtgacc

SEQ ID NO: 516 - DNA, 60 bp, Artificial Sequence
  Description of Artificial Sequence: targeting sequence/synthetic sequence
accctgcagcgggtggccggcatcagccggaccggcatgcagatcaaccggcacagcctg

SEQ ID NO: 517 - DNA, 60 bp, Artificial Sequence
  Description of Artificial Sequence: targeting sequence/synthetic sequence
cggcagcggcaccgggactgcgacaagccccctgacaagggcaactgcggccccgtgcgg

SEQ ID NO: 518 - DNA, 60 bp, Artificial Sequence
  Description of Artificial Sequence: targeting sequence/synthetic sequence
caaggcattacaaagccggcgattcgccgtctcgcccgacgtgggggcgtcaagcgcatt

SEQ ID NO: 519 - DNA, 60 bp, Artificial Sequence
  Description of Artificial Sequence: targeting sequence/synthetic sequence
aaaattcatctccagactactgattatggtaactttttggctaatcacacaaatcctctt

SEQ ID NO: 520 - DNA, 60 bp, Artificial Sequence
  Description of Artificial Sequence: targeting sequence/synthetic sequence
aggaaccctagaggctccagcagcagacagagcagcagtagcgctatgtcttcctcttct

SEQ ID NO: 521 - DNA, 60 bp, Artificial Sequence
  Description of Artificial Sequence: targeting sequence/synthetic sequence
actaagccagctatccggcgccttgctcgtcgcggcggtgtcaagcgaatttctggcctt

SEQ ID NO: 522 - DNA, 60 bp, Artificial Sequence
  Description of Artificial Sequence: targeting sequence/synthetic sequence
tgggtggcattagcagcagtggacagtgctgtgtatggagtccaaagaggagccaaaaag

SEQ ID NO: 523 - DNA, 60 bp, Artificial Sequence
  Description of Artificial Sequence: targeting sequence/synthetic sequence
ctcaaggagaacggcggcgccagactggccgagtaccacgccaaggccaccgagcatctg

SEQ ID NO: 524 - DNA, 60 bp, Artificial Sequence
  Description of Artificial Sequence: targeting sequence/synthetic sequence
accgccgagatcctggagctggcgggcaacgccgcccgcgacaacaagaagacccgcatc

SEQ ID NO: 525 - DNA, 60 bp, Artificial Sequence
  Description of Artificial Sequence: targeting sequence/synthetic sequence
agcacctacatggctgcctcagggctgaacgccagcacctacgatcaggtgggccgctcc

SEQ ID NO: 526 - DNA, 60 bp, Artificial Sequence
  Description of Artificial Sequence: targeting sequence/synthetic sequence
gacagcgtcctcactgccctgcaggactccagcaaacgaaagcagctggtcagcgatggc

SEQ ID NO: 527 - DNA, 60 bp, Artificial Sequence
  Description of Artificial Sequence: targeting sequence/synthetic sequence
ttggaaagcaggtctataaatgagaaagattatcatagtcgacgctacattgatgagtac

SEQ ID NO: 528 - DNA, 60 bp, Artificial Sequence
  Description of Artificial Sequence: targeting sequence/synthetic sequence
aagcactctgtggacagcgtcctcactgccctgcaggactccagcaaacgaaagcagctg

SEQ ID NO: 529 - DNA, 60 bp, Artificial Sequence
  Description of Artificial Sequence: targeting sequence/synthetic sequence
tatttggaaagcaggtctataaatgagaaagattatcatagtcgacgctacattgatgag

SEQ ID NO: 530 - DNA, 60 bp, Artificial Sequence
  Description of Artificial Sequence: targeting sequence/synthetic sequence
gccggcgtggccggccggatcaccggcagcatgagcctggccagcggcaagagcctgctc

SEQ ID NO: 531 - DNA, 60 bp, Artificial Sequence
  Description of Artificial Sequence: targeting sequence/synthetic sequence
gccggcatggccggcggaatcaccggcagcatgagcctggccagcggccggagcctgctc

SEQ ID NO: 532 - DNA, 60 bp, Artificial Sequence
  Description of Artificial Sequence: targeting sequence/synthetic sequence
cacgccaagagctccgactggggcctgcaggccggctacatccccgtgaaccccaacctg

SEQ ID NO: 533 - DNA, 60 bp, Artificial Sequence
  Description of Artificial Sequence: targeting sequence/synthetic sequence
gtgcacgccaagagctccgactggggcctgcaggccggctacatccccgtgaaccccaac

SEQ ID NO: 534 - DNA, 60 bp, Artificial Sequence
  Description of Artificial Sequence: targeting sequence/synthetic sequence
agtgcaacatatgatgacgaacatcacagtacattggtatctacaagacattatagagca

SEQ ID NO: 535 - DNA, 60 bp, Artificial Sequence
  Description of Artificial Sequence: targeting sequence/synthetic sequence
aagggcctgggcgtgcacgccaagagctccgactggggcctgcaggccggctacatcccc

SEQ ID NO: 536 - DNA, 60 bp, Artificial Sequence
  Description of Artificial Sequence: targeting sequence/synthetic sequence
cattatttggaaagcaggtctataaatgagaaagattatcatagtcgacgctacattgat

SEQ ID NO: 537 - DNA, 60 bp, Artificial Sequence
  Description of Artificial Sequence: targeting sequence/synthetic sequence
acatatgatgacgaacatcacagtacattggtatctacaagacattatagagcacctgaa

SEQ ID NO: 538 - DNA, 60 bp, Artificial Sequence
  Description of Artificial Sequence: targeting sequence/synthetic sequence
ctgggcgtgcacgccaagagctccgactggggcctgcaggccggctacatccccgtgaac

SEQ ID NO: 539 - DNA, 60 bp, Artificial Sequence
  Description of Artificial Sequence: targeting sequence/synthetic sequence
ctgaagcaagtccaccccgacaccggcatctcatcgaaggccatgggcatcatgaactcc

SEQ ID NO: 540 - DNA, 60 bp, Artificial Sequence
  Description of Artificial Sequence: targeting sequence/synthetic sequence
tacaaggtgctgaagcaggtccaccccgacaccggcatctcgtccaaggctatggggatt

SEQ ID NO: 541 - DNA, 60 bp, Artificial Sequence
  Description of Artificial Sequence: targeting sequence/synthetic sequence
gccgagatcctggagcttgccggcaacgcggcgcgcgacaacaagaagacgcgcatcatc

SEQ ID NO: 542 - DNA, 60 bp, Artificial Sequence
  Description of Artificial Sequence: targeting sequence/synthetic sequence
aagcaggtccaccccgacaccggtatctcgtccaaggccatgggcatcatgaactccttc

SEQ ID NO: 543 - DNA, 60 bp, Artificial Sequence
  Description of Artificial Sequence: targeting sequence/synthetic sequence
gtgtacaaggttctgaagcaggtccaccccgacaccggcatctcatccaaggccatgggg

SEQ ID NO: 544 - DNA, 60 bp, Artificial Sequence
  Description of Artificial Sequence: targeting sequence/synthetic sequence
tacctgaccgccgagatcctggagctggccggcaacgcggctcgcgacaacaagaagact

SEQ ID NO: 545 - DNA, 60 bp, Artificial Sequence
  Description of Artificial Sequence: targeting sequence/synthetic sequence
aaggtgctgaagcaggtccaccccgacaccggtatctcgtccaaggccatgggcatcatg

SEQ ID NO: 546 - DNA, 60 bp, Artificial Sequence
  Description of Artificial Sequence: targeting sequence/synthetic sequence
cgcctgctgcttcccggagagctggccaagcacgccgtgtcggagggcaccaaggccgtc

SEQ ID NO: 547 - DNA, 60 bp, Artificial Sequence
  Description of Artificial Sequence: targeting sequence/synthetic sequence
acagcagtgcgcttgctactgccgggagagctggctaaacatgctgtgtctgagggcacc

SEQ ID NO: 548 - DNA, 60 bp, Artificial Sequence
  Description of Artificial Sequence: targeting sequence/synthetic sequence
gtgcgcctgctgcttccgggggagctggccaagcacgcggtgtcggagggcaccaaggcc

SEQ ID NO: 549 - DNA, 60 bp, Artificial Sequence
  Description of Artificial Sequence: targeting sequence/synthetic sequence
gccgtgcgcctactgctacccggggaattggccaagcacgccgtgtccgagggcaccaag

SEQ ID NO: 550 - DNA, 60 bp, Artificial Sequence
  Description of Artificial Sequence: targeting sequence/synthetic sequence
acggccgtgcgcctgctgcttccgggggagctggccaagcacgccgtgtcggagggcacc

SEQ ID NO: 551 - DNA, 60 bp, Artificial Sequence
  Description of Artificial Sequence: targeting sequence/synthetic sequence
tacaaggtgctgaagcaggtccaccccgacaccggcatctcctctaaggccatgggaatc

SEQ ID NO: 552 - DNA, 60 bp, Artificial Sequence
  Description of Artificial Sequence: targeting sequence/synthetic sequence
gcaatagcggctggcgcaaccgctcgcgcaacgacagcctcgcggcttccttcatctgcg

SEQ ID NO: 553 - DNA, 60 bp, Artificial Sequence
  Description of Artificial Sequence: targeting sequence/synthetic sequence
tctaagagccttgttctgggacagaagctgtccttaacccagagtgacatcagccatatt

SEQ ID NO: 554 - DNA, 60 bp, Artificial Sequence
  Description of Artificial Sequence: targeting sequence/synthetic sequence
ctgggacagaagctgtccttaacccagagtgacatcagccatattggctccatgagagtg

SEQ ID NO: 555 - DNA, 60 bp, Artificial Sequence
  Description of Artificial Sequence: targeting sequence/synthetic sequence
aagcagaccctggccagcgtgagctccggccccaagcacacccagagcgtgcccgccctg

SEQ ID NO: 556 - DNA, 60 bp, Artificial Sequence
  Description of Artificial Sequence: targeting sequence/synthetic sequence
ctgctgggcattgagcagggggtaggtgtgccagggggcagccccgggtcccggcatcgg

SEQ ID NO: 557 - DNA, 60 bp, Artificial Sequence
  Description of Artificial Sequence: targeting sequence/synthetic sequence
ctaaagcaggtccaccccgacaccggcatctcatccaaggccatgggcatcatgaactcc

SEQ ID NO: 558 - DNA, 60 bp, Artificial Sequence
  Description of Artificial Sequence: targeting sequence/synthetic sequence
gccctggccggccagagacaggggactcaggcggaatccaacctgagtagtaaattccag

SEQ ID NO: 559 - DNA, 60 bp, Artificial Sequence
  Description of Artificial Sequence: targeting sequence/synthetic sequence
acttcgggggcaatagcggctggcgcaaccgctcgcgcaacgacagcctcgcggcttcct

SEQ ID NO: 560 - DNA, 60 bp, Artificial Sequence
  Description of Artificial Sequence: targeting sequence/synthetic sequence
ggacaaggtggcttggcctacccaggtgtgcggacccatgggactctggagagcgtgaat

SEQ ID NO: 561 - DNA, 60 bp, Artificial Sequence
  Description of Artificial Sequence: targeting sequence/synthetic sequence
cccaaaggctatggctacgggcagggcgcaggcaccctcagcactgacaagggggagtcg

SEQ ID NO: 562 - DNA, 60 bp, Artificial Sequence
  Description of Artificial Sequence: targeting sequence/synthetic sequence
ggcgccgctatgggcgccgctagcctgaccctgagcgcccagagccggaccagcctggcc

SEQ ID NO: 563 - DNA, 60 bp, Artificial Sequence
  Description of Artificial Sequence: targeting sequence/synthetic sequence
ctgaccacagccggcgccgctatgggcgccgctagcctgaccctgagcgcccagagccgg

SEQ ID NO: 564 - DNA, 60 bp, Artificial Sequence
  Description of Artificial Sequence: targeting sequence/synthetic sequence
gggaaggaccttctggccggcggagtcgcggcagctgtgtccaagacagcggtggcgccc

SEQ ID NO: 565 - DNA, 60 bp, Artificial Sequence
  Description of Artificial Sequence: targeting sequence/synthetic sequence
cgtgagatgtcaggctccccagcttctggcattcctgtcaaagtttctgccacggtgtct

SEQ ID NO: 566 - DNA, 60 bp, Artificial Sequence
  Description of Artificial Sequence: targeting sequence/synthetic sequence
accgccggcgccgctatgggcgccgctagcctgaccctgagcgcccagagccggaccctg

SEQ ID NO: 567 - DNA, 60 bp, Artificial Sequence
  Description of Artificial Sequence: targeting sequence/synthetic sequence
caggtccatccggacactggcatctcttcgaaagctatgagcattatgaattctttcgtc

SEQ ID NO: 568 - DNA, 60 bp, Artificial Sequence
  Description of Artificial Sequence: targeting sequence/synthetic sequence
ctgggcgccgctggcagcaccatgggcgccgtgagcgtggccctgaccggccaggcccgg

SEQ ID NO: 569 - DNA, 60 bp, Artificial Sequence
  Description of Artificial Sequence: targeting sequence/synthetic sequence
ttcgggaaggaccttctggccggcggagtcgcggcagctgtgtccaagacagcggtggcg

SEQ ID NO: 570 - DNA, 60 bp, Artificial Sequence
  Description of Artificial Sequence: targeting sequence/synthetic sequence
tcgggggcaatagcggctggcgcaaccgctcgcgcaacgacagcctcgcggcttccttca

SEQ ID NO: 571 - DNA, 60 bp, Artificial Sequence
  Description of Artificial Sequence: targeting sequence/synthetic sequence
ggcagcgccatgggcgccgctagcctgaccgtgagcgcccagagccggaccctgctcgcc

SEQ ID NO: 572 - DNA, 60 bp, Artificial Sequence
  Description of Artificial Sequence: targeting sequence/synthetic sequence
ggcgtggaggtgcataatgccaagacaaagccgcgggaggagcagttcaacagcacgttc

SEQ ID NO: 573 - DNA, 60 bp, Artificial Sequence
  Description of Artificial Sequence: targeting sequence/synthetic sequence
aagctgtccttaacccagagtgacatcagccatattggctccatgagagtggagggcatt

SEQ ID NO: 574 - DNA, 60 bp, Artificial Sequence
  Description of Artificial Sequence: targeting sequence/synthetic sequence
accgccgagatcctggagctggctggcaacgcggcccgcgacaacaagaagactcgcatc

SEQ ID NO: 575 - DNA, 60 bp, Artificial Sequence
  Description of Artificial Sequence: targeting sequence/synthetic sequence
actgccgagatcctggagctggcgggcaacgcagcccgcgacaacaaaaagacccgcatc

SEQ ID NO: 576 - DNA, 60 bp, Artificial Sequence
  Description of Artificial Sequence: targeting sequence/synthetic sequence
gatgcactgcagcgtggtaagggcctgagccatggggtcccggaacacccagccctgccc

SEQ ID NO: 577 - DNA, 60 bp, Artificial Sequence
  Description of Artificial Sequence: targeting sequence/synthetic sequence
ctaaagcaggtccatccggacactggcatctcttcgaaagctatgagcattatgaattct

SEQ ID NO: 578 - DNA, 60 bp, Artificial Sequence
  Description of Artificial Sequence: targeting sequence/synthetic sequence
gggggggccaccaatgccaatgccagggcaaagggaggcaccgggcagacaggaggcctg

SEQ ID NO: 579 - DNA, 60 bp, Artificial Sequence
  Description of Artificial Sequence: targeting sequence/synthetic sequence
gccgagatcctggagctggcgggcaacgcagcccgcgacaacaaaaagacccgcatcatc

SEQ ID NO: 580 - DNA, 60 bp, Artificial Sequence
  Description of Artificial Sequence: targeting sequence/synthetic sequence
gccgctggcagcaccatgggcgccgctagcatgaccctgaccgtgcaggcccggcagctg

SEQ ID NO: 581 - DNA, 60 bp, Artificial Sequence
  Description of Artificial Sequence: targeting sequence/synthetic sequence
tattccccaaattacaacccccagagcagaagtgtgcctccttcagcctcccatgtggca

SEQ ID NO: 582 - DNA, 60 bp, Artificial Sequence
  Description of Artificial Sequence: targeting sequence/synthetic sequence
gggcccccggtgtccgagctcattactaaagctgttgccgcctccaaggagcgcagcggc

SEQ ID NO: 583 - DNA, 60 bp, Artificial Sequence
  Description of Artificial Sequence: targeting sequence/synthetic sequence
gagatcctggagctggctggcaatgcggcccgcgacaacaagaagacccgtatcatcccg

SEQ ID NO: 584 - DNA, 60 bp, Artificial Sequence
  Description of Artificial Sequence: targeting sequence/synthetic sequence
tcagagctgatcgtgcaggctgcttcctcctctaaggagcgtggtggtgtgtcgttggca

SEQ ID NO: 585 - DNA, 60 bp, Artificial Sequence
  Description of Artificial Sequence: targeting sequence/synthetic sequence
aagcaggtccaccccgacaccggcatctcttccaaggctatgggaatcatgaactccttc

SEQ ID NO: 586 - DNA, 60 bp, Artificial Sequence
  Description of Artificial Sequence: targeting sequence/synthetic sequence
ggtagcacctacatggctgcctcagggctgaacgccagcacctacgatcaggtgggccgc

SEQ ID NO: 587 - DNA, 60 bp, Artificial Sequence
  Description of Artificial Sequence: targeting sequence/synthetic sequence
ggggcaatagcggctggcgcaaccgctcgcgcaacgacagcctcgcggcttccttcatct

SEQ ID NO: 588 - DNA, 60 bp, Artificial Sequence
  Description of Artificial Sequence: targeting sequence/synthetic sequence
ctgaagcaggtccaccccgacaccggcatctcttccaaggctatgggaatcatgaactcc

SEQ ID NO: 589 - DNA, 60 bp, Artificial Sequence
  Description of Artificial Sequence: targeting sequence/synthetic sequence
aagcaggtccaccctgacaccggcatttcgtccaaggccatgggcatcatgaattcgttt

SEQ ID NO: 590 - DNA, 60 bp, Artificial Sequence
  Description of Artificial Sequence: targeting sequence/synthetic sequence
aaggtgctgaagcaggtccaccccgacaccggcatctcttccaaggctatgggaatcatg

SEQ ID NO: 591 - DNA, 60 bp, Artificial Sequence
  Description of Artificial Sequence: targeting sequence/synthetic sequence
gccgctatgggcgccgctagcctgaccctgagcgcccagagccggaccctgctcgccggc

SEQ ID NO: 592 - DNA, 60 bp, Artificial Sequence
  Description of Artificial Sequence: targeting sequence/synthetic sequence
tcccaggtcattcttggggctcactcaataaccagggaagagccaacaaaacagataatg

SEQ ID NO: 593 - DNA, 60 bp, Artificial Sequence
  Description of Artificial Sequence: targeting sequence/synthetic sequence
attgctcctgtggtttccagccgcgtgagtccagggacaagaccaacagctatggggtct

SEQ ID NO: 594 - DNA, 60 bp, Artificial Sequence
  Description of Artificial Sequence: targeting sequence/synthetic sequence
aaggttctgaagcaggtccaccctgacaccggcatttcgtccaaggccatgggcatcatg

SEQ ID NO: 595 - DNA, 60 bp, Artificial Sequence
  Description of Artificial Sequence: targeting sequence/synthetic sequence
ctgtccttaacccagagtgacatcagccatattggctccatgagagtggagggcattgtc

SEQ ID NO: 596 - DNA, 60 bp, Artificial Sequence
  Description of Artificial Sequence: targeting sequence/synthetic sequence
gtttacaaggtgctgaagcaagtccaccccgacaccggcatctcctccaaagccatgggg

SEQ ID NO: 597 - DNA, 60 bp, Artificial Sequence
  Description of Artificial Sequence: targeting sequence/synthetic sequence
gaaatccttgagctggcaggcaatgcgtctcgcgataacaaaaaaactcgcattattccc

SEQ ID NO: 598 - DNA, 60 bp, Artificial Sequence
  Description of Artificial Sequence: targeting sequence/synthetic sequence
gccatcggcgccggcgtggccggcggaatcaccggcagcatgagcctggccagcggcaag

SEQ ID NO: 599 - DNA, 60 bp, Artificial Sequence
  Description of Artificial Sequence: targeting sequence/synthetic sequence
cagctgcagcccgccctgcagaccggcagcgaggaactgaagagcctgtacaacgccgtg

SEQ ID NO: 600 - DNA, 60 bp, Artificial Sequence
  Description of Artificial Sequence: targeting sequence/synthetic sequence
acaatagtaaaggccggaccagaatatggccaagggatgaaccctattagccgcctggcg

SEQ ID NO: 601 - DNA, 60 bp, Artificial Sequence
  Description of Artificial Sequence: targeting sequence/synthetic sequence
ggacagaagctgtccttaacccagagtgacatcagccatattggctccatgagagtggag

SEQ ID NO: 602 - DNA, 60 bp, Artificial Sequence
  Description of Artificial Sequence: targeting sequence/synthetic sequence
gagatcctggagctggcgggcaacgccgcccgcgacaacaagaagacccgcatcatcccc

SEQ ID NO: 603 - DNA, 60 bp, Artificial Sequence
  Description of Artificial Sequence: targeting sequence/synthetic sequence
gtgctgaaacaggtccatcccgacactggcatctcttccaaggccatgggcatcatgaat

SEQ ID NO: 604 - DNA, 60 bp, Artificial Sequence
  Description of Artificial Sequence: targeting sequence/synthetic sequence
cagctgaagagcgtgggcctgaacctggagggcaacggcgtggccaccgacgtgcccacc

SEQ ID NO: 605 - DNA, 60 bp, Artificial Sequence
  Description of Artificial Sequence: targeting sequence/synthetic sequence
tctagcaatagtgattccactcagagtcagaagtctggcaggaactcgaacccccggcaa

SEQ ID NO: 606 - DNA, 60 bp, Artificial Sequence
  Description of Artificial Sequence: targeting sequence/synthetic sequence
cctaaaacaatagtaaaggccggaccagaatatggccaagggatgaaccctattagccgc

SEQ ID NO: 607 - DNA, 60 bp, Artificial Sequence
  Description of Artificial Sequence: targeting sequence/synthetic sequence
accgccggcagcgccatgggcgccgctagcctgaccctgagcgcccagagccggaccctg

SEQ ID NO: 608 - DNA, 60 bp, Artificial Sequence
  Description of Artificial Sequence: targeting sequence/synthetic sequence
ccaaattacaacccccagagcagaagtgtgcctccttcagcctcccatgtggcacccaca

SEQ ID NO: 609 - DNA, 60 bp, Artificial Sequence
  Description of Artificial Sequence: targeting sequence/synthetic sequence
accaagcagaccctggccagcgtgagctccggccccaagcacacccagagcgtgcccgcc

SEQ ID NO: 610 - DNA, 60 bp, Artificial Sequence
  Description of Artificial Sequence: targeting sequence/synthetic sequence
aaagtgctaaagcaggtccatccggacactggcatctcttcgaaagctatgagcattatg

SEQ ID NO: 611 - DNA, 60 bp, Artificial Sequence
  Description of Artificial Sequence: targeting sequence/synthetic sequence
gtccgtgagatgtcaggctccccagcttctggcattcctgtcaaagtttctgccacggtg

SEQ ID NO: 612 - DNA, 60 bp, Artificial Sequence
  Description of Artificial Sequence: targeting sequence/synthetic sequence
aagcaagtccaccccgacaccggcatctcatcgaaggccatgggcatcatgaactccttc

SEQ ID NO: 613 - DNA, 60 bp, Artificial Sequence
  Description of Artificial Sequence: targeting sequence/synthetic sequence
cagaccctggccagcgtgagctccggccccaagcacacccagagcgtgcccgccctgacc

SEQ ID NO: 614 - DNA, 60 bp, Artificial Sequence
  Description of Artificial Sequence: targeting sequence/synthetic sequence
atcgtgcaggctgcttcctcctctaaggagcgtggtggtgtgtcgttggcagctcttaaa

SEQ ID NO: 615 - DNA, 60 bp, Artificial Sequence
  Description of Artificial Sequence: targeting sequence/synthetic sequence
gagatcctggagctggctggcaacgcggcccgcgacaacaagaagactcgcatcatcccg

SEQ ID NO: 616 - DNA, 60 bp, Artificial Sequence
  Description of Artificial Sequence: targeting sequence/synthetic sequence
ggcgccgctggcagcaccatgggcgcccggagcatgaccctgaccgtgcaggcccggcag

SEQ ID NO: 617 - DNA, 60 bp, Artificial Sequence
  Description of Artificial Sequence: targeting sequence/synthetic sequence
cagcaactggagcccgccctgaagaccggcagcgaggacctgaagagcctgtggaacgcc

SEQ ID NO: 618 - DNA, 60 bp, Artificial Sequence
  Description of Artificial Sequence: targeting sequence/synthetic sequence
gaggccctcagtgcgggcccgggcacctcggggagccacctggacagatccacagtgtct

SEQ ID NO: 619 - DNA, 60 bp, Artificial Sequence
  Description of Artificial Sequence: targeting sequence/synthetic sequence
ctgggcgccgctggcagcaccatgggcgcccggagcgtgaccctgaccgtgcaggcccgg

SEQ ID NO: 620 - DNA, 60 bp, Artificial Sequence
  Description of Artificial Sequence: targeting sequence/synthetic sequence
atggctgcctcagggctgaacgccagcacctacgatcaggtgggccgctcccacatcact

SEQ ID NO: 621 - DNA, 60 bp, Artificial Sequence
  Description of Artificial Sequence: targeting sequence/synthetic sequence
ggccagctgcagcccagcctgaagaccggcagcgaggaaatccggagcctgtacaacacc

SEQ ID NO: 622 - DNA, 60 bp, Artificial Sequence
  Description of Artificial Sequence: targeting sequence/synthetic sequence
aagcaggtccaccccgacaccggcatctcatccaaggccatggggatcatgaattccttc

SEQ ID NO: 623 - DNA, 60 bp, Artificial Sequence
  Description of Artificial Sequence: targeting sequence/synthetic sequence
accacagccggcgccgctatgggcgccgctagcctgaccctgagcgcccagagccggacc

SEQ ID NO: 624 - DNA, 60 bp, Artificial Sequence
  Description of Artificial Sequence: targeting sequence/synthetic sequence
cccccgtacggaggccaccagcccggcctttacccccagcagccgaactacaagcggcac

SEQ ID NO: 625 - DNA, 60 bp, Artificial Sequence
  Description of Artificial Sequence: targeting sequence/synthetic sequence
gccggcgccgctatgggcgccgctagcctgaccctgagcgcccagagccggaccctgctc

SEQ ID NO: 626 - DNA, 60 bp, Artificial Sequence
  Description of Artificial Sequence: targeting sequence/synthetic sequence
ggcggaatcgccgctggcgtgggcaccggcaccacagccctggtggccaccaagcagttc

SEQ ID NO: 627 - DNA, 60 bp, Artificial Sequence
  Description of Artificial Sequence: targeting sequence/synthetic sequence
gaggagttaaacaagctgctgggcaaagtgaccatcgctcagggcggcgtcctgcccaac

SEQ ID NO: 628 - DNA, 60 bp, Artificial Sequence
  Description of Artificial Sequence: targeting sequence/synthetic sequence
ctgggcacgggcacgggtggcagcggtggcttccacctggcccagcaggcctcggcctcg

SEQ ID NO: 629 - DNA, 60 bp, Artificial Sequence
  Description of Artificial Sequence: targeting sequence/synthetic sequence
cgtaagggaaactatgcagagcggataggggcaggcgcaccagtgtatttggcggcagtg

SEQ ID NO: 630 - DNA, 60 bp, Artificial Sequence
  Description of Artificial Sequence: targeting sequence/synthetic sequence
acgggtggcagcggtggcttccacctggcccagcaggcctcggcctcgggtagcgtcagc

SEQ ID NO: 631 - DNA, 60 bp, Artificial Sequence
  Description of Artificial Sequence: targeting sequence/synthetic sequence
atagtaaaggccggaccagaatatggccaagggatgaaccctattagccgcctggcgcaa

SEQ ID NO: 632 - DNA, 60 bp, Artificial Sequence
  Description of Artificial Sequence: targeting sequence/synthetic sequence
gacggcctgctcatccccaccagcggcaccgacaccacagtgaccaagcccaagagccgg

SEQ ID NO: 633 - DNA, 60 bp, Artificial Sequence
  Description of Artificial Sequence: targeting sequence/synthetic sequence
ggcatcgccgctggcgtgggcaccggcaccacagccctggtggccaccaagcagttcgag

SEQ ID NO: 634 - DNA, 60 bp, Artificial Sequence
  Description of Artificial Sequence: targeting sequence/synthetic sequence
cgccagcatctggaggccctcagtgcgggcccgggcacctcggggagccacctggacaga

SEQ ID NO: 635 - DNA, 60 bp, Artificial Sequence
  Description of Artificial Sequence: targeting sequence/synthetic sequence
gaaatctatcatagtgggagcaccaactacaacccgtccctcaagagtcgagtcaccata

SEQ ID NO: 636 - DNA, 60 bp, Artificial Sequence
  Description of Artificial Sequence: targeting sequence/synthetic sequence
gtgcgcctgctgcttcccggagagctggccaagcacgccgtgtcggagggcaccaaggcc

SEQ ID NO: 637 - DNA, 60 bp, Artificial Sequence
  Description of Artificial Sequence: targeting sequence/synthetic sequence
ggcgccgctggcagcaccatgggcgccgctagcatgaccctgaccgtgcaggcccggcag

SEQ ID NO: 638 - DNA, 60 bp, Artificial Sequence
  Description of Artificial Sequence: targeting sequence/synthetic sequence
gcatttccatccatcggcagcggcaggaacggttttccaaagcagacagcagctcagctg

SEQ ID NO: 639 - DNA, 60 bp, Artificial Sequence
  Description of Artificial Sequence: targeting sequence/synthetic sequence
aaacaggtccatcccgacactggcatctcttccaaggccatgggcatcatgaattctttc

SEQ ID NO: 640 - DNA, 60 bp, Artificial Sequence
  Description of Artificial Sequence: targeting sequence/synthetic sequence
ggcgccgctagcctgaccctgagcgcccagagccggaccagcctggccggcatcgtgcag

SEQ ID NO: 641 - DNA, 60 bp, Artificial Sequence
  Description of Artificial Sequence: targeting sequence/synthetic sequence
cagatcgccgacagccagcaccggagccaccggcagatggccaccacaaccaaccccctg

SEQ ID NO: 642 - DNA, 60 bp, Artificial Sequence
  Description of Artificial Sequence: targeting sequence/synthetic sequence
ggtggcagcggtggcttccacctggcccagcaggcctcggcctcgggtagcgtcagcatc

SEQ ID NO: 643 - DNA, 60 bp, Artificial Sequence
  Description of Artificial Sequence: targeting sequence/synthetic sequence
accgccgagatcctggagctggcgggcaatgcggcccgcgacaacaagaagacccgcatc

SEQ ID NO: 644 - DNA, 60 bp, Artificial Sequence
  Description of Artificial Sequence: targeting sequence/synthetic sequence
aagcaggtccaccccgacaccggcatctcgtccaaggctatggggattatgaactccttc

SEQ ID NO: 645 - DNA, 60 bp, Artificial Sequence
  Description of Artificial Sequence: targeting sequence/synthetic sequence
tatggtgggggggccaccaatgccaatgccagggcaaagggaggcaccgggcagacagga

SEQ ID NO: 646 - DNA, 60 bp, Artificial Sequence
  Description of Artificial Sequence: targeting sequence/synthetic sequence
gtccaccccgacaccggcatctcatccaaggccatgggcatcatgaactccttcgtcaac

SEQ ID NO: 647 - DNA, 60 bp, Artificial Sequence
  Description of Artificial Sequence: targeting sequence/synthetic sequence
tctgagcttatcaccaaggcagtggcagcttctaaggagcgcagcggcgtttctctggcc

SEQ ID NO: 648 - DNA, 60 bp, Artificial Sequence
  Description of Artificial Sequence: targeting sequence/synthetic sequence
gagctcaacaagctgcttggtaaagtgaccatcgcccagggtggtgtcctgcccaatatc

SEQ ID NO: 649 - DNA, 60 bp, Artificial Sequence
  Description of Artificial Sequence: targeting sequence/synthetic sequence
caggtgcaccccgacaccggcatctcgtccaaggccatgggcatcatgaactccttcgtc

SEQ ID NO: 650 - DNA, 60 bp, Artificial Sequence
  Description of Artificial Sequence: targeting sequence/synthetic sequence
ggcattgagcagggggtaggtgtgccagggggcagccccgggtcccggcatcggcagaag

SEQ ID NO: 651 - DNA, 60 bp, Artificial Sequence
  Description of Artificial Sequence: targeting sequence/synthetic sequence
cagcgtggtaagggcctgagccatggggtcccggaacacccagccctgcccacagccagc

SEQ ID NO: 652 - DNA, 60 bp, Artificial Sequence
  Description of Artificial Sequence: targeting sequence/synthetic sequence
caccccgacaccggtatctcgtccaaggccatgggcatcatgaactccttcgtcaatgac

SEQ ID NO: 653 - DNA, 60 bp, Artificial Sequence
  Description of Artificial Sequence: targeting sequence/synthetic sequence
ctgggcgccgctggcagcaccatgggcgccgctgccatcaccctgaccgcccaggcccgg

SEQ ID NO: 654 - DNA, 60 bp, Artificial Sequence
  Description of Artificial Sequence: targeting sequence/synthetic sequence
aatcagctgctaaaaggagtcaccatagccagtgggggtgtgttacccaacatccacccc

SEQ ID NO: 655 - DNA, 60 bp, Artificial Sequence
  Description of Artificial Sequence: targeting sequence/synthetic sequence
gccgagatcctggaactggctggcaacgcggcccgcgacaacaagaagacccgcatcatc

SEQ ID NO: 656 - DNA, 60 bp, Artificial Sequence
  Description of Artificial Sequence: targeting sequence/synthetic sequence
aagagcgtgggcctgaacctggagggcagcggcgtgagcaccgacatccccagcgccacc

SEQ ID NO: 657 - DNA, 60 bp, Artificial Sequence
  Description of Artificial Sequence: targeting sequence/synthetic sequence
tcttctaagagccttgttctgggacagaagctgtccttaacccagagtgacatcagccat

SEQ ID NO: 658 - DNA, 60 bp, Artificial Sequence
  Description of Artificial Sequence: targeting sequence/synthetic sequence
gccatgggcgccggcatggccggcggaatcaccggcagcatgagcctggccagcggccgg

SEQ ID NO: 659 - DNA, 60 bp, Artificial Sequence
  Description of Artificial Sequence: targeting sequence/synthetic sequence
ggcgccgctggcagcaccatgggcgccggcagcctgaccctgaccgtgcaggcccggcag

SEQ ID NO: 660 - DNA, 60 bp, Artificial Sequence
  Description of Artificial Sequence: targeting sequence/synthetic sequence
aagcaggtccatccggacactggcatctcttcgaaagctatgagcattatgaattctttc

SEQ ID NO: 661 - DNA, 60 bp, Artificial Sequence
  Description of Artificial Sequence: targeting sequence/synthetic sequence
gccggcgtggccggcggaatcaccggcagcatgagcctggccagcggcaagagcctgctc

SEQ ID NO: 662 - DNA, 60 bp, Artificial Sequence
  Description of Artificial Sequence: targeting sequence/synthetic sequence
atcgccgacagccagcaccggagccaccggcagatggccaccgccaccaaccccctgatc

SEQ ID NO: 663 - DNA, 60 bp, Artificial Sequence
  Description of Artificial Sequence: targeting sequence/synthetic sequence
attcttggggctcactcaataaccagggaagagccaacaaaacagataatgcttgttaag

SEQ ID NO: 664 - DNA, 60 bp, Artificial Sequence
  Description of Artificial Sequence: targeting sequence/synthetic sequence
aataagcttctaggtcgcgtgaccatcgcgcagggcggtgtcctgcccaacatccaggcc

SEQ ID NO: 665 - DNA, 60 bp, Artificial Sequence
  Description of Artificial Sequence: targeting sequence/synthetic sequence
gtatctgagcttatcaccaaggcagtggcagcttctaaggagcgcagcggcgtttctctg

SEQ ID NO: 666 - DNA, 60 bp, Artificial Sequence
  Description of Artificial Sequence: targeting sequence/synthetic sequence
ctagctgtgcatgtgcccgagggccagaccatcaaagggcgtgtgggcaccgtgggttac

SEQ ID NO: 667 - DNA, 60 bp, Artificial Sequence
  Description of Artificial Sequence: targeting sequence/synthetic sequence
agcgccatgggcgccgctagcctgaccctgagcgcccagagccggaccctgctcgccggc

SEQ ID NO: 668 - DNA, 60 bp, Artificial Sequence
  Description of Artificial Sequence: targeting sequence/synthetic sequence
tttccatccatcggcagcggcaggaacggttttccaaagcagacagcagctcagctgatt

SEQ ID NO: 669 - DNA, 60 bp, Artificial Sequence
  Description of Artificial Sequence: targeting sequence/synthetic sequence
agtgtcagtagcagaagctactctccagaaaggagcaaatcatactctttccatcagtct

SEQ ID NO: 670 - DNA, 60 bp, Artificial Sequence
  Description of Artificial Sequence: targeting sequence/synthetic sequence
atcattggccagctgcagcccagcctgcagaccggcagcgaggaactgaagagcctgtac

SEQ ID NO: 671 - DNA, 60 bp, Artificial Sequence
  Description of Artificial Sequence: targeting sequence/synthetic sequence
ctgatcagccccaagcggaccaagccccctctgcccagcgtgcggaagctggtggaggac

SEQ ID NO: 672 - DNA, 60 bp, Artificial Sequence
  Description of Artificial Sequence: targeting sequence/synthetic sequence
ggcatcgccggcggagtgaccggcagcctgagcctggccagctccaagagcctgctcctg

SEQ ID NO: 673 - DNA, 60 bp, Artificial Sequence
  Description of Artificial Sequence: targeting sequence/synthetic sequence
aaaacaatagtaaaggccggaccagaatatggccaagggatgaaccctattagccgcctg

SEQ ID NO: 674 - DNA, 60 bp, Artificial Sequence
  Description of Artificial Sequence: targeting sequence/synthetic sequence
aagctgctgggcaaagtaaccatcgctcagggtggtgtcctgcccaacatccaggctgtg

SEQ ID NO: 675 - DNA, 60 bp, Artificial Sequence
  Description of Artificial Sequence: targeting sequence/synthetic sequence
acctctcgcatgtccacctcacagattcctggtcgggtggcttccagtggtcttcagtct

SEQ ID NO: 676 - DNA, 60 bp, Artificial Sequence
  Description of Artificial Sequence: targeting sequence/synthetic sequence
cagatcatgaagcagctgcagcccgccctgaccggcaccgaggaactgcggagcctgttc

SEQ ID NO: 677 - DNA, 60 bp, Artificial Sequence
  Description of Artificial Sequence: targeting sequence/synthetic sequence
aaggccctgaagctgatggggtcaaatgaaggtgaattcaaggctgaaggaaatagcaaa

SEQ ID NO: 678 - DNA, 60 bp, Artificial Sequence
  Description of Artificial Sequence: targeting sequence/synthetic sequence
agtgattctagcaatagtgattccactcagagtcagaagtctggcaggaactcgaacccc

SEQ ID NO: 679 - DNA, 60 bp, Artificial Sequence
  Description of Artificial Sequence: targeting sequence/synthetic sequence
cagacggccgtgcgcctgctgcttcccggagagctggccaagcacgccgtgtcggagggc

SEQ ID NO: 680 - DNA, 60 bp, Artificial Sequence
  Description of Artificial Sequence: targeting sequence/synthetic sequence
gccgtgcgcctgctgcttcccggggagctggccaagcacgctgtgtcagagggcaccaag

SEQ ID NO: 681 - DNA, 60 bp, Artificial Sequence
  Description of Artificial Sequence: targeting sequence/synthetic sequence
agctggggacgagggtctgctgggggaaacgcccacagcccactgggggtgcctggaggt

SEQ ID NO: 682 - DNA, 60 bp, Artificial Sequence
  Description of Artificial Sequence: targeting sequence/synthetic sequence
ctgcgcaaaggcaactacgcggagcgagtgggggccggcgcgcccgtctacatggctgcg

SEQ ID NO: 683 - DNA, 60 bp, Artificial Sequence
  Description of Artificial Sequence: targeting sequence/synthetic sequence
aaagcgtctgggcccccggtgtccgagctcattactaaagctgttgccgcctccaaggag

SEQ ID NO: 684 - DNA, 60 bp, Artificial Sequence
  Description of Artificial Sequence: targeting sequence/synthetic sequence
tctcgcatgtccacctcacagattcctggtcgggtggcttccagtggtcttcagtctgtc

SEQ ID NO: 685 - DNA, 60 bp, Artificial Sequence
  Description of Artificial Sequence: targeting sequence/synthetic sequence
caggtccaccccgacaccggcatctcatccaaggccatgggcatcatgaactccttcgtc

SEQ ID NO: 686 - DNA, 60 bp, Artificial Sequence
  Description of Artificial Sequence: targeting sequence/synthetic sequence
gtgcatgtgcccgagggccagaccatcaaagggcgtgtgggcaccgtgggttacatggct

SEQ ID NO: 687 - DNA, 60 bp, Artificial Sequence
  Description of Artificial Sequence: targeting sequence/synthetic sequence
agatctggttccagtgtcagtagcagaagctactctccagaaaggagcaaatcatactct

SEQ ID NO: 688 - DNA, 60 bp, Artificial Sequence
  Description of Artificial Sequence: targeting sequence/synthetic sequence
ggtattgctggacagcgtggtgtggtcggcctgcctggtcagagaggagagagaggcttc

SEQ ID NO: 689 - DNA, 60 bp, Artificial Sequence
  Description of Artificial Sequence: targeting sequence/synthetic sequence
tttgccatcggcatcgtgggggacgctggcgtgcggggcaccgcccagcagccccgacta

SEQ ID NO: 690 - DNA, 60 bp, Artificial Sequence
  Description of Artificial Sequence: targeting sequence/synthetic sequence
ggcctgaacaccgccgacaccgcccggctgaacgccaacatccggtacgtgaacaccggc

SEQ ID NO: 691 - DNA, 60 bp, Artificial Sequence
  Description of Artificial Sequence: targeting sequence/synthetic sequence
tctggttccagtgtcagtagcagaagctactctccagaaaggagcaaatcatactctttc

SEQ ID NO: 692 - DNA, 60 bp, Artificial Sequence
  Description of Artificial Sequence: targeting sequence/synthetic sequence
ctgaccatgggcggaatcgccgctggcgtgggcaccggcaccacagccctggtggccacc

SEQ ID NO: 693 - DNA, 60 bp, Artificial Sequence
  Description of Artificial Sequence: targeting sequence/synthetic sequence
atcctgggccagctgcagcccagcctgaagaccggcagcgaggaaatccggagcctgtac

SEQ ID NO: 694 - DNA, 60 bp, Artificial Sequence
  Description of Artificial Sequence: targeting sequence/synthetic sequence
cgcaaaggcaactatgcggagcgggtcggtgctggagcgccggtgtacctggcggcggtg

SEQ ID NO: 695 - DNA, 60 bp, Artificial Sequence
  Description of Artificial Sequence: targeting sequence/synthetic sequence
cagggtggcgtcctgcccaacatccaggccgtactgctgcccaagaagacggagagccac

SEQ ID NO: 696 - DNA, 60 bp, Artificial Sequence
  Description of Artificial Sequence: targeting sequence/synthetic sequence
ctgaacaccgccgacaccgcccggctgaacgccaacatccggtacgtgaacaccggcacc

SEQ ID NO: 697 - DNA, 60 bp, Artificial Sequence
  Description of Artificial Sequence: targeting sequence/synthetic sequence
aacaaactgctaggccgggtgaccattgctcagggcggcgtccttcctaacatccaggcc

SEQ ID NO: 698 - DNA, 60 bp, Artificial Sequence
  Description of Artificial Sequence: targeting sequence/synthetic sequence
ggtgtttcccaggaccacatgcgggctcattaccaaacaggctccaaccacatgatgctg

SEQ ID NO: 699 - DNA, 60 bp, Artificial Sequence
  Description of Artificial Sequence: targeting sequence/synthetic sequence
ggcgcaaccgctcgcgcaacgacagcctcgcggcttccttcatctgcggtaacacccagg

SEQ ID NO: 700 - DNA, 60 bp, Artificial Sequence
  Description of Artificial Sequence: targeting sequence/synthetic sequence
gctcgcgcaacgacagcctcgcggcttccttcatctgcggtaacacccagggctccacat

SEQ ID NO: 701 - DNA, 60 bp, Artificial Sequence
  Description of Artificial Sequence: targeting sequence/synthetic sequence
ggctttgccatcggcatcgtgggggacgctggcgtgcggggcaccgcccagcagccccga

SEQ ID NO: 702 - DNA, 60 bp, Artificial Sequence
  Description of Artificial Sequence: targeting sequence/synthetic sequence
ttcctgggcgccgctggcagcaccatgggcgcccggagcatgaccctgaccgtgcaggcc

SEQ ID NO: 703 - DNA, 60 bp, Artificial Sequence
  Description of Artificial Sequence: targeting sequence/synthetic sequence
atcattggccagctgcagagctccctgcagaccggcagcgaggaactgaagagcctgtac

SEQ ID NO: 704 - DNA, 60 bp, Artificial Sequence
  Description of Artificial Sequence: targeting sequence/synthetic sequence
gtaaagaaggccctgaagctgatggggtcaaatgaaggtgaattcaaggctgaaggaaat

SEQ ID NO: 705 - DNA, 60 bp, Artificial Sequence
  Description of Artificial Sequence: targeting sequence/synthetic sequence
ctgcgcaaaggcaactacgcggagcgggtgggggccggcgcgcccgtctacatggcggcg

SEQ ID NO: 706 - DNA, 60 bp, Artificial Sequence
  Description of Artificial Sequence: targeting sequence/synthetic sequence
tccgtttacgtgtacaaggtgctgaagcaggtccaccccgacaccggcatctcgtccaag

SEQ ID NO: 707 - DNA, 60 bp, Artificial Sequence
  Description of Artificial Sequence: targeting sequence/synthetic sequence
aagtatgggcccaaaggctatggctacgggcagggcgcaggcaccctcagcactgacaag

SEQ ID NO: 708 - DNA, 60 bp, Artificial Sequence
  Description of Artificial Sequence: targeting sequence/synthetic sequence
aaagttaccatcgctcagggcggtgttctgcctaacatccaggccgtactgctccccaag

SEQ ID NO: 709 - DNA, 60 bp, Artificial Sequence
  Description of Artificial Sequence: targeting sequence/synthetic sequence
ttcctggccaccgccggcagcgccatgggcgccgctagcctgaccctgagcgcccacccc

SEQ ID NO: 710 - DNA, 60 bp, Artificial Sequence
  Description of Artificial Sequence: targeting sequence/synthetic sequence
agcaccatgggcgccgctagcatcaccctgaccgtgcaggcccggcagctgctcagcggc

SEQ ID NO: 711 - DNA, 60 bp, Artificial Sequence
  Description of Artificial Sequence: targeting sequence/synthetic sequence
attggggaaatctatcatagtgggagcaccaactacaacccgtccctcaagagtcgagtc

SEQ ID NO: 712 - DNA, 60 bp, Artificial Sequence
  Description of Artificial Sequence: targeting sequence/synthetic sequence
gccggcagcaccatgggcgccgctgccgtgaccctgaccgtgcaggcccggcagctgctc

SEQ ID NO: 713 - DNA, 60 bp, Artificial Sequence
  Description of Artificial Sequence: targeting sequence/synthetic sequence
attgcccagggcggagtcctgcctaacattcaggcagtgctgctgcccaagaagactgag

SEQ ID NO: 714 - DNA, 60 bp, Artificial Sequence
  Description of Artificial Sequence: targeting sequence/synthetic sequence
agcaccatgggcgccgctagcctgaccctgaccgtgcaggcccggcagctgctcagcggc

SEQ ID NO: 715 - DNA, 60 bp, Artificial Sequence
  Description of Artificial Sequence: targeting sequence/synthetic sequence
ttctaccccctggaggggggccgggtgctgctggacggcaagcccatcagcgcctacgac

SEQ ID NO: 716 - DNA, 60 bp, Artificial Sequence
  Description of Artificial Sequence: targeting sequence/synthetic sequence
ttgctgcgcaaaggcaactacgcggagcgggtgggggccggcgcgcccgtctacatggcg

SEQ ID NO: 717 - DNA, 60 bp, Artificial Sequence
  Description of Artificial Sequence: targeting sequence/synthetic sequence
cgcaaaggcaactatgccgagcgggtcggggccggcgcgccggtgtatctggcagcggtg

SEQ ID NO: 718 - DNA, 60 bp, Artificial Sequence
  Description of Artificial Sequence: targeting sequence/synthetic sequence
tataacaccacctacctgaatgtccagcgggaaaatgggaccatctccagatacgtggga

SEQ ID NO: 719 - DNA, 60 bp, Artificial Sequence
  Description of Artificial Sequence: targeting sequence/synthetic sequence
ctgctccgcaagggcaactacgctgagcgggtcggtgccggagcgccggtgtacctggcg

SEQ ID NO: 720 - DNA, 60 bp, Artificial Sequence
  Description of Artificial Sequence: targeting sequence/synthetic sequence
cttcgtaagggaaactatgcagagcggataggggcaggcgcaccagtgtatttggcggca

SEQ ID NO: 721 - DNA, 60 bp, Artificial Sequence
  Description of Artificial Sequence: targeting sequence/synthetic sequence
ctccgcaagggcaactattcggagcgcgtgggcgccggcgccccggtctatctggccgcg

SEQ ID NO: 722 - DNA, 60 bp, Artificial Sequence
  Description of Artificial Sequence: targeting sequence/synthetic sequence
ggtaaagtgaccatcgcccagggtggtgtcctgcccaatatccaggccgtgctgctgcct

SEQ ID NO: 723 - DNA, 60 bp, Artificial Sequence
  Description of Artificial Sequence: targeting sequence/synthetic sequence
gccggcgccgctatgggcgccgctagcctgaccctgagcgcccagagccggaccctgttc

SEQ ID NO: 724 - DNA, 60 bp, Artificial Sequence
  Description of Artificial Sequence: targeting sequence/synthetic sequence
ggcgcccgggccagcgtgctgaccggcggaaagctggacgcctgggagaagatccggctg

SEQ ID NO: 725 - DNA, 60 bp, Artificial Sequence
  Description of Artificial Sequence: targeting sequence/synthetic sequence
tcccaggaccacatgcgggctcattaccaaacaggctccaaccacatgatgctgaacatc

SEQ ID NO: 726 - DNA, 60 bp, Artificial Sequence
  Description of Artificial Sequence: targeting sequence/synthetic sequence
tcacgcgtcatgggcaccaacgacggcaaggccctgctgcccgccgtccgcacgctcaag

SEQ ID NO: 727 - DNA, 60 bp, Artificial Sequence
  Description of Artificial Sequence: targeting sequence/synthetic sequence
ctgcttcgtaagggaaactatgcagagcggataggggcaggcgcaccagtgtatttggcg

SEQ ID NO: 728 - DNA, 60 bp, Artificial Sequence
  Description of Artificial Sequence: targeting sequence/synthetic sequence
gccaacttggagctcatcaacacctgggtggccaagaacaccaacaacaagatcagccgg

SEQ ID NO: 729 - DNA, 60 bp, Artificial Sequence
  Description of Artificial Sequence: targeting sequence/synthetic sequence
agggcctacggcccttacaccccccagcctcagcctaaggacatggtgaagcctccctat

SEQ ID NO: 730 - DNA, 60 bp, Artificial Sequence
  Description of Artificial Sequence: targeting sequence/synthetic sequence
cgcgtgaccatcgcgcagggcggtgtcctgcccaacatccaggccgtattgctgcctaag

SEQ ID NO: 731 - DNA, 60 bp, Artificial Sequence
  Description of Artificial Sequence: targeting sequence/synthetic sequence
accacctacctgaatgtccagcgggaaaatgggaccatctccagatacgtgggaggccaa

SEQ ID NO: 732 - DNA, 60 bp, Artificial Sequence
  Description of Artificial Sequence: targeting sequence/synthetic sequence
ttctctcgggatttcttggattccagggaagctccccgggacatccaggcacgaatgcga

SEQ ID NO: 733 - DNA, 60 bp, Artificial Sequence
  Description of Artificial Sequence: targeting sequence/synthetic sequence
aacttggagctcatcaacacctgggtggccaagaacaccaacaacaagatcagccggctg

SEQ ID NO: 734 - DNA, 60 bp, Artificial Sequence
  Description of Artificial Sequence: targeting sequence/synthetic sequence
cgcttttctaaggactttctggactcccgggagcctcacagagacatccacgcgagaatg

SEQ ID NO: 735 - DNA, 60 bp, Artificial Sequence
  Description of Artificial Sequence: targeting sequence/synthetic sequence
ctccgcaaaggcaactactccgagcgcgtcggggctggcgcgccggtgtatctcgcggcg

SEQ ID NO: 736 - DNA, 60 bp, Artificial Sequence
  Description of Artificial Sequence: targeting sequence/synthetic sequence
aagtatgggccaaaaggctacggttatggccagggcgctggcacgcttaacatggaccgt

SEQ ID NO: 737 - DNA, 60 bp, Artificial Sequence
  Description of Artificial Sequence: targeting sequence/synthetic sequence
ctccgcaagggcaactatgctgagcgggtcggggccggcgcgccggtgtacctggcggcg

SEQ ID NO: 738 - DNA, 60 bp, Artificial Sequence
  Description of Artificial Sequence: targeting sequence/synthetic sequence
cgcaaaggcaactacgcggagcgggtcggggcaggcgccccggtgtacctggcggcggtc

SEQ ID NO: 739 - DNA, 60 bp, Artificial Sequence
  Description of Artificial Sequence: targeting sequence/synthetic sequence
ctccgcaagggcaactactccgagcgagtcggggccggcgcgccagtgtatctggcggcg

SEQ ID NO: 740 - DNA, 60 bp, Artificial Sequence
  Description of Artificial Sequence: targeting sequence/synthetic sequence
gcctcacgcgtcatgggcaccaacgacggcaaggccctgctgcccgccgtccgcacgctc

SEQ ID NO: 741 - DNA, 60 bp, Artificial Sequence
  Description of Artificial Sequence: targeting sequence/synthetic sequence
accatcgctcagggcggtgttctgcctaacatccaggccgtactgctccccaagaagact

SEQ ID NO: 742 - DNA, 60 bp, Artificial Sequence
  Description of Artificial Sequence: targeting sequence/synthetic sequence
cagcccccgtacggaggccaccagcccggcctttacccccagcagccgaactacaagcgg

SEQ ID NO: 743 - DNA, 60 bp, Artificial Sequence
  Description of Artificial Sequence: targeting sequence/synthetic sequence
ggcgtgacgatcgcccagggaggcgtcctgcccaacatccaggccgtgctgctgcccaag

SEQ ID NO: 744 - DNA, 60 bp, Artificial Sequence
  Description of Artificial Sequence: targeting sequence/synthetic sequence
gctagggcctacggcccttacaccccccagcctcagcctaaggacatggtgaagcctccc

SEQ ID NO: 745 - DNA, 60 bp, Artificial Sequence
  Description of Artificial Sequence: targeting sequence/synthetic sequence
ggagggactgcaacctggaaacctgggagctctggacctggaagtactggaagctggaac

SEQ ID NO: 746 - DNA, 60 bp, Artificial Sequence
  Description of Artificial Sequence: targeting sequence/synthetic sequence
cctggtagtaccggaacctggaatcctggcagctctgaacgcggaagtgctgggcactgg

SEQ ID NO: 747 - DNA, 60 bp, Artificial Sequence
  Description of Artificial Sequence: targeting sequence/synthetic sequence
ggcaaagtcaccatcgcccagggcggcgttttgcctaacatccaggccgttctgttacca

SEQ ID NO: 748 - DNA, 60 bp, Artificial Sequence
  Description of Artificial Sequence: targeting sequence/synthetic sequence
cgggccagcgtgctgagcggcggaaagctggacaagtgggagaagatccagctgcggccc

SEQ ID NO: 749 - DNA, 60 bp, Artificial Sequence
  Description of Artificial Sequence: targeting sequence/synthetic sequence
ggcaaagtcaccatcgcgcagggtggtgtcttgcccaatatccaggccgtgctgctgcct

SEQ ID NO: 750 - DNA, 60 bp, Artificial Sequence
  Description of Artificial Sequence: targeting sequence/synthetic sequence
atcaagcccaagaaaatcaagccccctctgcccagcgtgaccaagctgaccgaggaccgg

SEQ ID NO: 751 - DNA, 60 bp, Artificial Sequence
  Description of Artificial Sequence: targeting sequence/synthetic sequence
agtagcagaagctactctccagaaaggagcaaatcatactctttccatcagtctcaacat

SEQ ID NO: 752 - DNA, 60 bp, Artificial Sequence
  Description of Artificial Sequence: targeting sequence/synthetic sequence
ctggagaacttctaccccctggaggggggccgggtgctgctggacggcaagcccatcagc

SEQ ID NO: 753 - DNA, 60 bp, Artificial Sequence
  Description of Artificial Sequence: targeting sequence/synthetic sequence
gttggacctgcagggtctcctggttcaaatggtgcccctggacaaagaggagaacctgga

SEQ ID NO: 754 - DNA, 60 bp, Artificial Sequence
  Description of Artificial Sequence: targeting sequence/synthetic sequence
ggcgccgctagcctgaccctgagcgcccagagccggaccctgttccggggcatcgtgcag

SEQ ID NO: 755 - DNA, 60 bp, Artificial Sequence
  Description of Artificial Sequence: targeting sequence/synthetic sequence
atcctggagaacttctaccccctggaggggggccgggtgctgctggacggcaagcccatc

SEQ ID NO: 756 - DNA, 60 bp, Artificial Sequence
  Description of Artificial Sequence: targeting sequence/synthetic sequence
acagctcctctgacagagttacttcactctaggaatgaaggtgtggcgacatatgcagct

SEQ ID NO: 757 - DNA, 60 bp, Artificial Sequence
  Description of Artificial Sequence: targeting sequence/synthetic sequence
gtgtacaaggtgctgaagcaggtccaccccgacaccggcatctcctctaaggccatggga

SEQ ID NO: 758 - DNA, 60 bp, Artificial Sequence
  Description of Artificial Sequence: targeting sequence/synthetic sequence
ctgcgggacaccacacacatcagccaggaggtgatgccccagggcctgggcgacctgatc

SEQ ID NO: 759 - DNA, 60 bp, Artificial Sequence
  Description of Artificial Sequence: targeting sequence/synthetic sequence
ggagccacagctcctctgacagagttacttcactctaggaatgaaggtgtggcgacatat

SEQ ID NO: 760 - DNA, 60 bp, Artificial Sequence
  Description of Artificial Sequence: targeting sequence/synthetic sequence
cgggacaccacacacatcgagcagaaggccctggcccagggcctgggccagatgctggag

SEQ ID NO: 761 - DNA, 60 bp, Artificial Sequence
  Description of Artificial Sequence: targeting sequence/synthetic sequence
gtgtacaaggtgctgaagcaggtccaccccgacaccggcatctcttctaaggccatggga

SEQ ID NO: 762 - DNA, 60 bp, Artificial Sequence
  Description of Artificial Sequence: targeting sequence/synthetic sequence
actgttaccacgccgggtctgttactttcccaagctctaccagcaccaccaggggctcta

SEQ ID NO: 763 - DNA, 60 bp, Artificial Sequence
  Description of Artificial Sequence: targeting sequence/synthetic sequence
tcggtcactgttaccacgccgggtctgttactttcccaagctctaccagcaccaccaggg

SEQ ID NO: 764 - DNA, 60 bp, Artificial Sequence
  Description of Artificial Sequence: targeting sequence/synthetic sequence
atgggccaggaccccttcttcctctccaagcccagctctttccccaaggccatggaaacc

SEQ ID NO: 765 - DNA, 60 bp, Artificial Sequence
  Description of Artificial Sequence: targeting sequence/synthetic sequence
tttcactctggtggatatggccaggatgccttgggtatggaccccatgatggaacatgag

SEQ ID NO: 766 - DNA, 60 bp, Artificial Sequence
  Description of Artificial Sequence: targeting sequence/synthetic sequence
cagggcggcgtcttgcccaatatccaggctgtcctgttgcccaagaaaacggagagtcac

SEQ ID NO: 767 - DNA, 60 bp, Artificial Sequence
  Description of Artificial Sequence: targeting sequence/synthetic sequence
caggaccccttcttcctctccaagcccagctctttccccaaggccatggaaaccaccacc

SEQ ID NO: 768 - DNA, 60 bp, Artificial Sequence
  Description of Artificial Sequence: targeting sequence/synthetic sequence
cagatcctgggccagctgcagcccagcctgcagaccggcagcgaggaactgaagagcctg

SEQ ID NO: 769 - DNA, 60 bp, Artificial Sequence
  Description of Artificial Sequence: targeting sequence/synthetic sequence
atcatggagcagctgcagagcaccctgaagaccggcagcgaggaaatcaagagcctgtac

SEQ ID NO: 770 - DNA, 60 bp, Artificial Sequence
  Description of Artificial Sequence: targeting sequence/synthetic sequence
ctggtgcagctgcagcccgccctgcagaccggcacccaggagatcaagagcctgtacaac

SEQ ID NO: 771 - DNA, 60 bp, Artificial Sequence
  Description of Artificial Sequence: targeting sequence/synthetic sequence
ccccctctgcccagcgtgaccgagctggccgaggaccggtggaacaagccccagaagacc

SEQ ID NO: 772 - DNA, 60 bp, Artificial Sequence
  Description of Artificial Sequence: targeting sequence/synthetic sequence
ctcagaaaagggcaccaactggatggtacacgaagaggtgataatgacagccaccaagga

SEQ ID NO: 773 - DNA, 60 bp, Artificial Sequence
  Description of Artificial Sequence: targeting sequence/synthetic sequence
aaagggcaccaactggatggtacacgaagaggtgataatgacagccaccaaggagatttg

SEQ ID NO: 774 - DNA, 60 bp, Artificial Sequence
  Description of Artificial Sequence: targeting sequence/synthetic sequence
gccgctggcagcaccatgggcgccgctagcatcaccctgaccgtgcaggcccggaccctg

SEQ ID NO: 775 - DNA, 60 bp, Artificial Sequence
  Description of Artificial Sequence: targeting sequence/synthetic sequence
gccggcagcaccatgggcgcccggagcatgaccctgaccgtgcaggcccggcagctgctc

SEQ ID NO: 776 - DNA, 60 bp, Artificial Sequence
  Description of Artificial Sequence: targeting sequence/synthetic sequence
aagatcaagccccctctgcccagcgtgcggaagctggtggaggaccggtggaacaatccc

SEQ ID NO: 777 - DNA, 60 bp, Artificial Sequence
  Description of Artificial Sequence: targeting sequence/synthetic sequence
aagccccctctgcccagcgtgcagcggctgaccgaggaccggtggaacaagccctggaag

SEQ ID NO: 778 - DNA, 60 bp, Artificial Sequence
  Description of Artificial Sequence: targeting sequence/synthetic sequence
ctgaagcaggtccaccccgacaccggcatctcgtccaaggccatgggcatcatgaactcc

SEQ ID NO: 779 - DNA, 60 bp, Artificial Sequence
  Description of Artificial Sequence: targeting sequence/synthetic sequence
ctgattcgcaaacttcccttccagcgtctggtgcgagaaattgctcaggactttaaaaca

SEQ ID NO: 780 - DNA, 60 bp, Artificial Sequence
  Description of Artificial Sequence: targeting sequence/synthetic sequence
ttccgctcactggtgtcccaggagacaagcttctttgatgagaaccgcacaggggacctc

SEQ ID NO: 781 - DNA, 60 bp, Artificial Sequence
  Description of Artificial Sequence: targeting sequence/synthetic sequence
aaggtgctgaaacaggtccaccccgacaccggcatctcctctaaagccatggggatcatg

SEQ ID NO: 782 - DNA, 60 bp, Artificial Sequence
  Description of Artificial Sequence: targeting sequence/synthetic sequence
gtgctgaagcaggtccaccccgacaccggcatctcttccaaggctatgggaatcatgaac

SEQ ID NO: 783 - DNA, 60 bp, Artificial Sequence
  Description of Artificial Sequence: targeting sequence/synthetic sequence
aaggtgctgaagcaggtccaccccgacaccggcatctcttctaaggccatgggaatcatg

SEQ ID NO: 784 - DNA, 60 bp, Artificial Sequence
  Description of Artificial Sequence: targeting sequence/synthetic sequence
cctgggccatctggtccccgaggtcagcctggtgtcatgggcttccccggtcctaaagga

SEQ ID NO: 785 - DNA, 60 bp, Artificial Sequence
  Description of Artificial Sequence: targeting sequence/synthetic sequence
aacttcagccagatcctgcccgaccccctgaagcccaccaagcggagcttcatcgaggac

SEQ ID NO: 786 - DNA, 60 bp, Artificial Sequence
  Description of Artificial Sequence: targeting sequence/synthetic sequence
ctgaagcaggtccaccccgacaccggcatctcttctaaggccatgggaatcatgaactcc

SEQ ID NO: 787 - DNA, 60 bp, Artificial Sequence
  Description of Artificial Sequence: targeting sequence/synthetic sequence
ttcagccagatcctgcccgaccccctgaagcccaccaagcggagcttcatcgaggacctg

SEQ ID NO: 788 - DNA, 60 bp, Artificial Sequence
  Description of Artificial Sequence: targeting sequence/synthetic sequence
gtgctgaagcaagtccaccccgacaccggcatctcatcgaaggccatgggcatcatgaac

SEQ ID NO: 789 - DNA, 60 bp, Artificial Sequence
  Description of Artificial Sequence: targeting sequence/synthetic sequence
taccaggaggccaagagctccaagatcatggagtccttcaagaacatggtgccccagcaa

SEQ ID NO: 790 - DNA, 60 bp, Artificial Sequence
  Description of Artificial Sequence: targeting sequence/synthetic sequence
aaggttctgaagcaggtccaccccgacaccggcatctcatccaaggccatggggatcatg

SEQ ID NO: 791 - DNA, 60 bp, Artificial Sequence
  Description of Artificial Sequence: targeting sequence/synthetic sequence
gagttgaagcctgccaacctgcctgtcacccagccatttacagtgggtgacaataagaca

SEQ ID NO: 792 - DNA, 60 bp, Artificial Sequence
  Description of Artificial Sequence: targeting sequence/synthetic sequence
ccagcaaaggagccagccaagaaatcaaggaaacatgctgcctcagatgttgatctggag

SEQ ID NO: 793 - DNA, 60 bp, Artificial Sequence
  Description of Artificial Sequence: targeting sequence/synthetic sequence
ttgaagcctgccaacctgcctgtcacccagccatttacagtgggtgacaataagacatac

SEQ ID NO: 794 - DNA, 60 bp, Artificial Sequence
  Description of Artificial Sequence: targeting sequence/synthetic sequence
tcagcatcggaaccagcaaaggagccagccaagaaatcaaggaaacatgctgcctcagat

SEQ ID NO: 795 - DNA, 60 bp, Artificial Sequence
  Description of Artificial Sequence: targeting sequence/synthetic sequence
atgctgaggaagattgctgtggctgcagcgtccaagccagcagtggagatcaaacaggag

SEQ ID NO: 796 - DNA, 60 bp, Artificial Sequence
  Description of Artificial Sequence: targeting sequence/synthetic sequence
gaccccaggctgttgaagaacattgaggatcgccatcccacagccccttgcattcaggag

SEQ ID NO: 797 - DNA, 60 bp, Artificial Sequence
  Description of Artificial Sequence: targeting sequence/synthetic sequence
caagcacttcctccgagtcaagaagttaatgatgccatcaaacaaatgaagaaacaccta

SEQ ID NO: 798 - DNA, 60 bp, Artificial Sequence
  Description of Artificial Sequence: targeting sequence/synthetic sequence
tttgacctgtccgctgtggaacctgctgagaggcctagccgggccagactggaactgaga

SEQ ID NO: 799 - DNA, 60 bp, Artificial Sequence
  Description of Artificial Sequence: targeting sequence/synthetic sequence
tacaaggtgctaaagcaggtccaccccgacaccggcatctcatccaaggccatgggcatc

SEQ ID NO: 800 - DNA, 60 bp, Artificial Sequence
  Description of Artificial Sequence: targeting sequence/synthetic sequence
cgccgttatcagaagtcgactgagctgctcatccgcaaactgccatttcagcgcctggtg

SEQ ID NO: 801 - DNA, 60 bp, Artificial Sequence
  Description of Artificial Sequence: targeting sequence/synthetic sequence
ctgcaggaggcctgcgaggcctacctggtggggctgtttgaggacaccaacctatgcgcc

SEQ ID NO: 802 - DNA, 60 bp, Artificial Sequence
  Description of Artificial Sequence: targeting sequence/synthetic sequence
tacaaggtgctgaagcaagtccaccccgacaccggcatctcctccaaagccatggggatc

SEQ ID NO: 803 - DNA, 60 bp, Artificial Sequence
  Description of Artificial Sequence: targeting sequence/synthetic sequence
ggcggctccagctccaacagcacccgagagccgcccgcctcgggtcgggtggcgttggta

SEQ ID NO: 804 - DNA, 60 bp, Artificial Sequence
  Description of Artificial Sequence: targeting sequence/synthetic sequence
tcactggtgtcccaggagacaagcttctttgatgagaaccgcacaggggacctcatctcc

SEQ ID NO: 805 - DNA, 60 bp, Artificial Sequence
  Description of Artificial Sequence: targeting sequence/synthetic sequence
tacaacccgtccctcaagagtcgagtcaccatatcagtagacacgtccaagaagcagctc

SEQ ID NO: 806 - DNA, 60 bp, Artificial Sequence
  Description of Artificial Sequence: targeting sequence/synthetic sequence
tacaaggtgctgaagcaggtccatcccgacaccggcatctcttccaaggcaatggggatc

SEQ ID NO: 807 - DNA, 60 bp, Artificial Sequence
  Description of Artificial Sequence: targeting sequence/synthetic sequence
ttatgtgaagatcctttgccacctattccgaaagattcttctcgtcctaaagcttcttca

SEQ ID NO: 808 - DNA, 60 bp, Artificial Sequence
  Description of Artificial Sequence: targeting sequence/synthetic sequence
accaactacaacccgtccctcaagagtcgagtcaccatatcagtagacacgtccaagaag

SEQ ID NO: 809 - DNA, 60 bp, Artificial Sequence
  Description of Artificial Sequence: targeting sequence/synthetic sequence
ctcggcgagaagaccgtcttcgggcaagagctccgagtagggagccgtgaggctgccttc

SEQ ID NO: 810 - DNA, 60 bp, Artificial Sequence
  Description of Artificial Sequence: targeting sequence/synthetic sequence
cgcaagttgcctttccaacgcctggtgcgagaaatcgctcaggacttcaagacagatctg

SEQ ID NO: 811 - DNA, 60 bp, Artificial Sequence
  Description of Artificial Sequence: targeting sequence/synthetic sequence
cttcccgactccatcactttctcctggaaatacaagaacaactctgacatcagcagcacc

SEQ ID NO: 812 - DNA, 60 bp, Artificial Sequence
  Description of Artificial Sequence: targeting sequence/synthetic sequence
actcaagcacttcctccgagtcaagaagttaatgatgccatcaaacaaatgaagaaacac

SEQ ID NO: 813 - DNA, 60 bp, Artificial Sequence
  Description of Artificial Sequence: targeting sequence/synthetic sequence
gtgatgctgaggaagattgctgtggctgcagcgtccaagccagcagtggagatcaaacag

SEQ ID NO: 814 - DNA, 60 bp, Artificial Sequence
  Description of Artificial Sequence: targeting sequence/synthetic sequence
gaggatatgcttggtcgggtattcaatggatcgggaaaacccattgacagaggtcctgtt

SEQ ID NO: 815 - DNA, 60 bp, Artificial Sequence
  Description of Artificial Sequence: targeting sequence/synthetic sequence
acagtggtgtttgacctgtccgctgtggaacctgctgagaggcctagccgggccagactg

SEQ ID NO: 816 - DNA, 60 bp, Artificial Sequence
  Description of Artificial Sequence: targeting sequence/synthetic sequence
tcctactaccaggaggccaagagctccaagatcatggagtccttcaagaacatggtgccc

SEQ ID NO: 817 - DNA, 60 bp, Artificial Sequence
  Description of Artificial Sequence: targeting sequence/synthetic sequence
gtgatgcccatctgcctaccttcaaaggattatgcagaagtagggcgtgtgggttatgtt

SEQ ID NO: 818 - DNA, 60 bp, Artificial Sequence
  Description of Artificial Sequence: targeting sequence/synthetic sequence
ctgcaggaggcctgcgaggcctacttggtggggctctttgaggataccaacctgtgtgcc

SEQ ID NO: 819 - DNA, 60 bp, Artificial Sequence
  Description of Artificial Sequence: targeting sequence/synthetic sequence
caggcccagctgaaggtgaagtacctgagcgagctgaagaaactgaacttcctggagaag

SEQ ID NO: 820 - DNA, 60 bp, Artificial Sequence
  Description of Artificial Sequence: targeting sequence/synthetic sequence
gacacaaacctttgcgccatccatgctaagcgagtgactattatgcccaaagacatccag

SEQ ID NO: 821 - DNA, 60 bp, Artificial Sequence
  Description of Artificial Sequence: targeting sequence/synthetic sequence
tacgaccagtggcgagcctggatgcagaagtcgcacaagacccgcaaccaggacgagggg

SEQ ID NO: 822 - DNA, 60 bp, Artificial Sequence
  Description of Artificial Sequence: targeting sequence/synthetic sequence
cctggaacaaaagggacaagaggacctccgggagcatctggctaccctggaaacccagga

SEQ ID NO: 823 - DNA, 60 bp, Artificial Sequence
  Description of Artificial Sequence: targeting sequence/synthetic sequence
gggctgtttgaggacaccaacctgtgtgtcatccatgccaaacgggtcaccatcatgcct

SEQ ID NO: 824 - DNA, 60 bp, Artificial Sequence
  Description of Artificial Sequence: targeting sequence/synthetic sequence
ctgggtcgggttttcaatggctccggcaagcccattgacaaggggccagtggtcatggcg

SEQ ID NO: 825 - DNA, 60 bp, Artificial Sequence
  Description of Artificial Sequence: targeting sequence/synthetic sequence
tccagctccaacagcacccgagagccgcccgcctcgggtcgggtggcgttggtaaaggtg

SEQ ID NO: 826 - DNA, 60 bp, Artificial Sequence
  Description of Artificial Sequence: targeting sequence/synthetic sequence
acaaaagggacaagaggacctccgggagcatctggctaccctggaaacccaggacttccc

SEQ ID NO: 827 - DNA, 60 bp, Artificial Sequence
  Description of Artificial Sequence: targeting sequence/synthetic sequence
gacagagaccgagagagggacttcaaggacaagcgtttcaggagagagtttggagatagt

SEQ ID NO: 828 - DNA, 60 bp, Artificial Sequence
  Description of Artificial Sequence: targeting sequence/synthetic sequence
gcctggatcaagagcaagaccgccagcatcctgggcatccccatggcccagaagcagagc

SEQ ID NO: 829 - DNA, 60 bp, Artificial Sequence
  Description of Artificial Sequence: targeting sequence/synthetic sequence
gaccagtggcgagcctggatgcagaagtcgcacaagacccgcaaccaggacgaggggatc

SEQ ID NO: 830 - DNA, 60 bp, Artificial Sequence
  Description of Artificial Sequence: targeting sequence/synthetic sequence
gccggcgccgctctgggcgtggccaccgccgctcagatcaccgccggcatcgccctgcac

SEQ ID NO: 831 - DNA, 60 bp, Artificial Sequence
  Description of Artificial Sequence: targeting sequence/synthetic sequence
gattccgtggactcccttcgcgactccccacacagcgagaggtacgtgtcggccctgacc

SEQ ID NO: 832 - DNA, 60 bp, Artificial Sequence
  Description of Artificial Sequence: targeting sequence/synthetic sequence
atcggcaccatcgccctgggcgtggccaccagcgcccagatcaccgccgctgtggccctg

SEQ ID NO: 833 - DNA, 60 bp, Artificial Sequence
  Description of Artificial Sequence: targeting sequence/synthetic sequence
ggggcggagatcgtgtacaagtcgccagtggtgtctggggacacgtctccacggcatctc

SEQ ID NO: 834 - DNA, 60 bp, Artificial Sequence
  Description of Artificial Sequence: targeting sequence/synthetic sequence
atccgcaagctgcccttccagcggctggtacgcgagatcgcgcaggactttaagacggac

SEQ ID NO: 835 - DNA, 60 bp, Artificial Sequence
  Description of Artificial Sequence: targeting sequence/synthetic sequence
tggcgagcctggatgcagaagtcgcacaagacccgcaaccaggacgaggggatcctgccc

SEQ ID NO: 836 - DNA, 60 bp, Artificial Sequence
  Description of Artificial Sequence: targeting sequence/synthetic sequence
gctggcagcagggggctctccgacccgtgggcagactcagtgggagtgcgaccccgcacc

SEQ ID NO: 837 - DNA, 60 bp, Artificial Sequence
  Description of Artificial Sequence: targeting sequence/synthetic sequence
gagagggacttcaaggacaagcgtttcaggagagagtttggagatagtaagcgtgtcttt

SEQ ID NO: 838 - DNA, 60 bp, Artificial Sequence
  Description of Artificial Sequence: targeting sequence/synthetic sequence
gcgctgcaggaggcctgcgaggcctacctggtggggctgtttgaggacaccaacctatgc

SEQ ID NO: 839 - DNA, 60 bp, Artificial Sequence
  Description of Artificial Sequence: targeting sequence/synthetic sequence
tggatcaaggccaagaccgccagcatcctgggcatccccatcgcccagaagcagagcgcc

SEQ ID NO: 840 - DNA, 60 bp, Artificial Sequence
  Description of Artificial Sequence: targeting sequence/synthetic sequence
caggcccagctgaagatcgactacctgaccaagctgaagcagctgaacctgctcgagaag

SEQ ID NO: 841 - DNA, 60 bp, Artificial Sequence
  Description of Artificial Sequence: targeting sequence/synthetic sequence
atgcccatctgcctaccttcaaaggattatgcagaagtagggcgtgtgggttatgtttct

SEQ ID NO: 842 - DNA, 60 bp, Artificial Sequence
  Description of Artificial Sequence: targeting sequence/synthetic sequence
aggctgttgaagaacattgaggatcgccatcccacagccccttgcattcaggagttcctc

SEQ ID NO: 843 - DNA, 60 bp, Artificial Sequence
  Description of Artificial Sequence: targeting sequence/synthetic sequence
gaggataccaacctgtgcgccatccacgccaaacgcgtcactattatgcttaaagacatc

SEQ ID NO: 844 - DNA, 60 bp, Artificial Sequence
  Description of Artificial Sequence: targeting sequence/synthetic sequence
agggggctctccgacccgtgggcagactcagtgggagtgcgaccccgcaccacggagcgc

SEQ ID NO: 845 - DNA, 60 bp, Artificial Sequence
  Description of Artificial Sequence: targeting sequence/synthetic sequence
ttcgacaaggctcgcttctctgggacctggtacgccatggccaagaaggaccccgagggc

SEQ ID NO: 846 - DNA, 60 bp, Artificial Sequence
  Description of Artificial Sequence: targeting sequence/synthetic sequence
gactcccttcgcgactccccacacagcgagaggtacgtgtcggccctgaccacgcccgcg

SEQ ID NO: 847 - DNA, 60 bp, Artificial Sequence
  Description of Artificial Sequence: targeting sequence/synthetic sequence
ctgatccgcaagctgcccttccagcggctggtacgcgagatcgcgcaggactttaagacg

SEQ ID NO: 848 - DNA, 60 bp, Artificial Sequence
  Description of Artificial Sequence: targeting sequence/synthetic sequence
aagatcttatgtgaagatcctttgccacctattccgaaagattcttctcgtcctaaagct

SEQ ID NO: 849 - DNA, 60 bp, Artificial Sequence
  Description of Artificial Sequence: targeting sequence/synthetic sequence
gtgtacaagtcgccagtggtgtctggggacacgtctccacggcatctcagcaatgtctcc

SEQ ID NO: 850 - DNA, 60 bp, Artificial Sequence
  Description of Artificial Sequence: targeting sequence/synthetic sequence
ggtcgtttagctgaaatgcctgcagatagtggatatccagcctatcttggtgcccgtctg

SEQ ID NO: 851 - DNA, 60 bp, Artificial Sequence
  Description of Artificial Sequence: targeting sequence/synthetic sequence
gaaatctctggtcgtttagctgaaatgcctgcagatagtggatatccagcctatcttggt

SEQ ID NO: 852 - DNA, 60 bp, Artificial Sequence
  Description of Artificial Sequence: targeting sequence/synthetic sequence
ttccttcccgactccatcactttctcctggaaatacaagaacaactctgacatcagcagc

SEQ ID NO: 853 - DNA, 60 bp, Artificial Sequence
  Description of Artificial Sequence: targeting sequence/synthetic sequence
ggcgagaagaccgtcttcgggcaagagctccgagtagggagccgtgaggctgccttcacg

SEQ ID NO: 854 - DNA, 60 bp, Artificial Sequence
  Description of Artificial Sequence: targeting sequence/synthetic sequence
tggaaggagctcacttaccaggaagtcctcagcttcaagcccccagagccaccgaagcca

SEQ ID NO: 855 - DNA, 60 bp, Artificial Sequence
  Description of Artificial Sequence: targeting sequence/synthetic sequence
cgcttctctgggacctggtacgccatggccaagaaggaccccgagggcctctttctgcag

SEQ ID NO: 856 - DNA, 60 bp, Artificial Sequence
  Description of Artificial Sequence: targeting sequence/synthetic sequence
gtgctgcggggcaagaaagccgacgagctggagaaggtgcggctgcggcccggcggaaag

SEQ ID NO: 857 - DNA, 60 bp, Artificial Sequence
  Description of Artificial Sequence: targeting sequence/synthetic sequence
cggaacagcgtgctgcggggcaagaaagccgacgagctggagaagatccggctgcggccc

SEQ ID NO: 858 - DNA, 60 bp, Artificial Sequence
  Description of Artificial Sequence: targeting sequence/synthetic sequence
ttatatcaggatattgcctggtttgatgaaaaggaaaacagcacaggaggcttgacaaca

SEQ ID NO: 859 - DNA, 60 bp, Artificial Sequence
  Description of Artificial Sequence: targeting sequence/synthetic sequence
cttcagaagagcacacacctcttgataaggaagctgcccttcagccgcctggcaagagaa

SEQ ID NO: 860 - DNA, 60 bp, Artificial Sequence
  Description of Artificial Sequence: targeting sequence/synthetic sequence
aaggagctcacttaccaggaagtcctcagcttcaagcccccagagccaccgaagccacct

SEQ ID NO: 861 - DNA, 60 bp, Artificial Sequence
  Description of Artificial Sequence: targeting sequence/synthetic sequence
atgttatatcaggatattgcctggtttgatgaaaaggaaaacagcacaggaggcttgaca

SEQ ID NO: 862 - DNA, 60 bp, Artificial Sequence
  Description of Artificial Sequence: targeting sequence/synthetic sequence
ctgaagcaggtccaccccgacaccggtatctcgtccaaggccatgggcatcatgaactcc

SEQ ID NO: 863 - DNA, 60 bp, Artificial Sequence
  Description of Artificial Sequence: targeting sequence/synthetic sequence
agcaaccgggtgcgggtgagcatccagaccggcaccgccttccagcccgacgccgctatg

SEQ ID NO: 864 - DNA, 60 bp, Artificial Sequence
  Description of Artificial Sequence: targeting sequence/synthetic sequence
gtcctgggcctcaccaagtctggcggctcagatcgcaccattgcctacgaaaacaaagcc

SEQ ID NO: 865 - DNA, 60 bp, Artificial Sequence
  Description of Artificial Sequence: targeting sequence/synthetic sequence
accagcaatgtgcatgtgtctgtggccggctcacactcacaggcagccaactttgcagcc

SEQ ID NO: 866 - DNA, 60 bp, Artificial Sequence
  Description of Artificial Sequence: targeting sequence/synthetic sequence
gtgcatgtgtctgtggccggctcacactcacaggcagccaactttgcagcccagaagacc

SEQ ID NO: 867 - DNA, 60 bp, Artificial Sequence
  Description of Artificial Sequence: targeting sequence/synthetic sequence
cccctgcccagcgtgaccaagctgaccgaggaccggtggaacgagcaccagaagatgcag

SEQ ID NO: 868 - DNA, 60 bp, Artificial Sequence
  Description of Artificial Sequence: targeting sequence/synthetic sequence
gcccccatcgagaaaaccatctccaaaaccaaaggacagccccgagaaccacaggtgtac

SEQ ID NO: 869 - DNA, 60 bp, Artificial Sequence
  Description of Artificial Sequence: targeting sequence/synthetic sequence
gtgaagccccctctgcccagcgtgaccaagctgaccgaggaccggtggaacaagccccag

SEQ ID NO: 870 - DNA, 60 bp, Artificial Sequence
  Description of Artificial Sequence: targeting sequence/synthetic sequence
cgtaaactacctttccagcgcctggtgcgcgagattgcgcaggactttaaaacagacctg

SEQ ID NO: 871 - DNA, 60 bp, Artificial Sequence
  Description of Artificial Sequence: targeting sequence/synthetic sequence
aagcaggtccaccccgacaccggcatctcatccaaggccatgggcatcatgaactccttc

SEQ ID NO: 872 - DNA, 60 bp, Artificial Sequence
  Description of Artificial Sequence: targeting sequence/synthetic sequence
aaaacaaaagcagatgaccgaggaacagatgaaaagacttcagagcagacaatcctcaat

SEQ ID NO: 873 - DNA, 60 bp, Artificial Sequence
  Description of Artificial Sequence: targeting sequence/synthetic sequence
agcaccgagtacaccagcggcaagatcaacctgagccaccagggcgcctacgtggcccag

SEQ ID NO: 874 - DNA, 60 bp, Artificial Sequence
  Description of Artificial Sequence: targeting sequence/synthetic sequence
caggtccaccccgacaccggcatctcttctaaggccatgggaatcatgaactccttcgtc

SEQ ID NO: 875 - DNA, 60 bp, Artificial Sequence
  Description of Artificial Sequence: targeting sequence/synthetic sequence
aaggcatttcttgaggtaaatgaagaaggcagtgaagcagctgcaagtaccgctgttgtg

SEQ ID NO: 876 - DNA, 60 bp, Artificial Sequence
  Description of Artificial Sequence: targeting sequence/synthetic sequence
gagaaaaccatctccaaagccaaagggcagccccgagaaccacaggtgtacaccctgccc

SEQ ID NO: 877 - DNA, 60 bp, Artificial Sequence
  Description of Artificial Sequence: targeting sequence/synthetic sequence
cgcttgctactgccgggagagctggctaaacatgctgtgtctgagggcaccaaggctgtc

SEQ ID NO: 878 - DNA, 60 bp, Artificial Sequence
  Description of Artificial Sequence: targeting sequence/synthetic sequence
acaaaagcagatgaccgaggaacagatgaaaagacttcagagcagacaatcctcaatatg

SEQ ID NO: 879 - DNA, 60 bp, Artificial Sequence
  Description of Artificial Sequence: targeting sequence/synthetic sequence
aagcaggtccaccccgacaccggcatctcttctaaggccatgggaatcatgaactccttc

SEQ ID NO: 880 - DNA, 60 bp, Artificial Sequence
  Description of Artificial Sequence: targeting sequence/synthetic sequence
cagcggatcctgaaggtgctggaccccctggtgcccaccggcagcgagaacctgaagagc

SEQ ID NO: 881 - DNA, 60 bp, Artificial Sequence
  Description of Artificial Sequence: targeting sequence/synthetic sequence
cgcaagacagtcacagccatggacgtggtgtacgcgctcaagcgccagggacgcactctt

SEQ ID NO: 882 - DNA, 60 bp, Artificial Sequence
  Description of Artificial Sequence: targeting sequence/synthetic sequence
ctggtggaggcggccgcctcccagcgcagctcatccctggcttccaacaggctgaagatt

SEQ ID NO: 883 - DNA, 60 bp, Artificial Sequence
  Description of Artificial Sequence: targeting sequence/synthetic sequence
gatcacgctgggacgtacgggttgggggacaggaaagatcaggggggctacaccatgcac

SEQ ID NO: 884 - DNA, 60 bp, Artificial Sequence
  Description of Artificial Sequence: targeting sequence/synthetic sequence
cgggtgaccattgctcagggcggcgtccttcctaacatccaggccgtgcttctgcctaag

SEQ ID NO: 885 - DNA, 60 bp, Artificial Sequence
  Description of Artificial Sequence: targeting sequence/synthetic sequence
acgtttaccctacgtcctggtgaggtgacggcgctggtgggacccaatgggtctgggaag

SEQ ID NO: 886 - DNA, 60 bp, Artificial Sequence
  Description of Artificial Sequence: targeting sequence/synthetic sequence
cacagtgggaccaccctttataatccctccctcgagagtcgagtcaccatgtcagtagac

SEQ ID NO: 887 - DNA, 60 bp, Artificial Sequence
  Description of Artificial Sequence: targeting sequence/synthetic sequence
agagactcagctgaaggaaatgacagttatccatctgggatccatctggaacttcaaagg

SEQ ID NO: 888 - DNA, 60 bp, Artificial Sequence
  Description of Artificial Sequence: targeting sequence/synthetic sequence
atcggcaccgtccacaccgacctgccctcccagcctcagctccgggacaaaacccagccg

SEQ ID NO: 889 - DNA, 60 bp, Artificial Sequence
  Description of Artificial Sequence: targeting sequence/synthetic sequence
caggtccaccccgacaccggcatctcgtccaaggctatggggattatgaactccttcgtc

SEQ ID NO: 890 - DNA, 60 bp, Artificial Sequence
  Description of Artificial Sequence: targeting sequence/synthetic sequence
ggccagctgcagcccgccatccagaccggcaccgaggaactgcggagcctgtacaacacc

SEQ ID NO: 891 - DNA, 60 bp, Artificial Sequence
  Description of Artificial Sequence: targeting sequence/synthetic sequence
aaggtgctgggccccctggtgcccaccggcagcgagaacctgaagagcctgtacaacacc

SEQ ID NO: 892 - DNA, 60 bp, Artificial Sequence
  Description of Artificial Sequence: targeting sequence/synthetic sequence
aagcaagtccaccccgacaccggcatctcctccaaagccatggggatcatgaattccttt

SEQ ID NO: 893 - DNA, 60 bp, Artificial Sequence
  Description of Artificial Sequence: targeting sequence/synthetic sequence
catcccgacaccggcatctcttccaaggcaatggggatcatgaattccttcgtcaacgac

SEQ ID NO: 894 - DNA, 60 bp, Artificial Sequence
  Description of Artificial Sequence: targeting sequence/synthetic sequence
cctgtcctgggcctcaccaagtctggcggctcagatcgcaccattgcctacgaaaacaaa

SEQ ID NO: 895 - DNA, 60 bp, Artificial Sequence
  Description of Artificial Sequence: targeting sequence/synthetic sequence
gtcaatgacatcttcgagcgcatcgccagcgaggcctcccgcctggcacactacaacaag

SEQ ID NO: 896 - DNA, 60 bp, Artificial Sequence
  Description of Artificial Sequence: targeting sequence/synthetic sequence
ctgggcctcaccaagtctggcggctcagatcgcaccattgcctacgaaaacaaagccctg

SEQ ID NO: 897 - DNA, 60 bp, Artificial Sequence
  Description of Artificial Sequence: targeting sequence/synthetic sequence
cagaagatcctgcgggtgctggaccccctggtgcccaccggcagcgagaacctgaagagc

SEQ ID NO: 898 - DNA, 60 bp, Artificial Sequence
  Description of Artificial Sequence: targeting sequence/synthetic sequence
accggcatttcgtccaaggccatgggcatcatgaattcgtttgtgaacgacattttcgag

SEQ ID NO: 899 - DNA, 60 bp, Artificial Sequence
  Description of Artificial Sequence: targeting sequence/synthetic sequence
gtccaccccgacaccggcatctcctctaaggccatgggaatcatgaactccttcgtcaac

SEQ ID NO: 900 - DNA, 60 bp, Artificial Sequence
  Description of Artificial Sequence: targeting sequence/synthetic sequence
aaaaccgacctgaggtttcagagcgcagccatcggtgcgctgcaggaggctagcgaagcg

SEQ ID NO: 901 - DNA, 60 bp, Artificial Sequence
  Description of Artificial Sequence: targeting sequence/synthetic sequence
atcttcaagttcaacgagaccgcccccgtgcccaccatcccccctctggacaccaagatc

SEQ ID NO: 902 - DNA, 60 bp, Artificial Sequence
  Description of Artificial Sequence: targeting sequence/synthetic sequence
gaggcgtcccgcctggcgcactacaacaagcgctccaccatcacatcccgcgagatccag

SEQ ID NO: 903 - DNA, 60 bp, Artificial Sequence
  Description of Artificial Sequence: targeting sequence/synthetic sequence
accaacctgtgtgctatccatgccaaacgtgtaacaattatgccaaaagacatccagcta

SEQ ID NO: 904 - DNA, 60 bp, Artificial Sequence
  Description of Artificial Sequence: targeting sequence/synthetic sequence
cataaggcatttcttgaggtaaatgaagaaggcagtgaagcagctgcaagtaccgctgtt

SEQ ID NO: 905 - DNA, 60 bp, Artificial Sequence
  Description of Artificial Sequence: targeting sequence/synthetic sequence
agcaactgcaggcacgagagagacgctggtgtggtctgcaccaatgaaaccaggagcacc

SEQ ID NO: 906 - DNA, 60 bp, Artificial Sequence
  Description of Artificial Sequence: targeting sequence/synthetic sequence
caccccgacaccggcatctcatccaaggccatgggcatcatgaactccttcgtcaacgat

SEQ ID NO: 907 - DNA, 60 bp, Artificial Sequence
  Description of Artificial Sequence: targeting sequence/synthetic sequence
actggtgaggcccaaagccggtggccccgcagaggcgggagtggggccatggctgaggcg

SEQ ID NO: 908 - DNA, 60 bp, Artificial Sequence
  Description of Artificial Sequence: targeting sequence/synthetic sequence
ctcaacaagctgctgggcggcgtgacgatcgcccagggaggcgtcctgcccaacatccag

SEQ ID NO: 909 - DNA, 60 bp, Artificial Sequence
  Description of Artificial Sequence: targeting sequence/synthetic sequence
gtgaagatcctgcccgaggtgaaggagaagcacgagttcctgaaccggctgaagcagctg

SEQ ID NO: 910 - DNA, 60 bp, Artificial Sequence
  Description of Artificial Sequence: targeting sequence/synthetic sequence
accttctttgacgccaataagacagggcagctggtgagccgcttgacaactgacgtgcag

SEQ ID NO: 911 - DNA, 60 bp, Artificial Sequence
  Description of Artificial Sequence: targeting sequence/synthetic sequence
cgcttccagagcgcagctatcggtgctttgcaggaggcaagtgaggcctatctggttggc

SEQ ID NO: 912 - DNA, 60 bp, Artificial Sequence
  Description of Artificial Sequence: targeting sequence/synthetic sequence
aacaccacacctcccatgctggactccgacggctccttcttcctctacagcaagctcacc

SEQ ID NO: 913 - DNA, 60 bp, Artificial Sequence
  Description of Artificial Sequence: targeting sequence/synthetic sequence
ataccatacagagaagataaaaacctcactggcactgcccgatatgctagcatcaatgca

SEQ ID NO: 914 - DNA, 60 bp, Artificial Sequence
  Description of Artificial Sequence: targeting sequence/synthetic sequence
ctcgggggtgtcaccattgcccagggcggcgtcttgcccaatatccaggctgtcctgttg

SEQ ID NO: 915 - DNA, 60 bp, Artificial Sequence
  Description of Artificial Sequence: targeting sequence/synthetic sequence
accacaagcaccgagtacaccagcggcaagatcaacctgagccaccagggcgcctacgtg

SEQ ID NO: 916 - DNA, 60 bp, Artificial Sequence
  Description of Artificial Sequence: targeting sequence/synthetic sequence
ggcaccgtccacaccgacctgccctcccagcctcagctccgggacaaaacccagccgcac

SEQ ID NO: 917 - DNA, 60 bp, Artificial Sequence
  Description of Artificial Sequence: targeting sequence/synthetic sequence
agttactcctcaggccatgttcatttatcctcagagaataaattccaaaactctgcaatc

SEQ ID NO: 918 - DNA, 60 bp, Artificial Sequence
  Description of Artificial Sequence: targeting sequence/synthetic sequence
ctgaaccccgccggctacctgctcggcaagatcaacctgaaggccctggccgctctggcc

SEQ ID NO: 919 - DNA, 60 bp, Artificial Sequence
  Description of Artificial Sequence: targeting sequence/synthetic sequence
gttcatgacatattggaccgcatcgccaccgaggctggtcacctggcccgctccaccaag

SEQ ID NO: 920 - DNA, 60 bp, Artificial Sequence
  Description of Artificial Sequence: targeting sequence/synthetic sequence
ctgttggcagatattaccagcaagtaccgtcaaggtgacagaaaagggcagattaaagaa

SEQ ID NO: 921 - DNA, 60 bp, Artificial Sequence
  Description of Artificial Sequence: targeting sequence/synthetic sequence
cccgtggcctgcacgcagaggctccccacggccgccgaccttcttcagattcgatcgtat

SEQ ID NO: 922 - DNA, 60 bp, Artificial Sequence
  Description of Artificial Sequence: targeting sequence/synthetic sequence
cttcccgtggcctgcacgcagaggctccccacggccgccgaccttcttcagattcgatcg

SEQ ID NO: 923 - DNA, 60 bp, Artificial Sequence
  Description of Artificial Sequence: targeting sequence/synthetic sequence
gaggatcagtcgctggagaacagtgaggccgatgtgaaggagtccaggaaggatgtgctc

SEQ ID NO: 924 - DNA, 60 bp, Artificial Sequence
  Description of Artificial Sequence: targeting sequence/synthetic sequence
cggatcctgaaggtgctggaccccctggtgcccaccggcagcgagaacctgaagagcctg

SEQ ID NO: 925 - DNA, 60 bp, Artificial Sequence
  Description of Artificial Sequence: targeting sequence/synthetic sequence
gatcagtcgctggagaacagtgaggccgatgtgaaggagtccaggaaggatgtgctccct

SEQ ID NO: 926 - DNA, 60 bp, Artificial Sequence
  Description of Artificial Sequence: targeting sequence/synthetic sequence
ttcgaagataccaacctgtgtgccatccacgctaagagagtcaccatcatgcccaaagac

SEQ ID NO: 927 - DNA, 60 bp, Artificial Sequence
  Description of Artificial Sequence: targeting sequence/synthetic sequence
cggagagtggtccagcgggagaagcgggccgtgggcctgggcgccgtgttctttggcttc

SEQ ID NO: 928 - DNA, 60 bp, Artificial Sequence
  Description of Artificial Sequence: targeting sequence/synthetic sequence
cactgcgcccaaaccgaagtcatagccacactcaagaatgggaagaaagcttgtctcaac

SEQ ID NO: 929 - DNA, 60 bp, Artificial Sequence
  Description of Artificial Sequence: targeting sequence/synthetic sequence
gttctgcccaacatccaggctgtactgctccccaagaagactgagagtcaccacaaggcc

SEQ ID NO: 930 - DNA, 60 bp, Artificial Sequence
  Description of Artificial Sequence: targeting sequence/synthetic sequence
tgcaagatcattcccgaggccaaggacaaggtggagttcctgaccaagctgaagcagctg

SEQ ID NO: 931 - DNA, 60 bp, Artificial Sequence
  Description of Artificial Sequence: targeting sequence/synthetic sequence
aagatcgagaagaacggcaagaacgtgcacgtgatcggcacccacacccagagcgaggac

SEQ ID NO: 932 - DNA, 60 bp, Artificial Sequence
  Description of Artificial Sequence: targeting sequence/synthetic sequence
gcgggcgaggcttctcgcctggctcactacaataagcgctcgaccatcacctccagggag

SEQ ID NO: 933 - DNA, 60 bp, Artificial Sequence
  Description of Artificial Sequence: targeting sequence/synthetic sequence
gtgttggagaccggcggcgaggccgggatcacccgatcggtggtggccaccactcgagcc

SEQ ID NO: 934 - DNA, 60 bp, Artificial Sequence
  Description of Artificial Sequence: targeting sequence/synthetic sequence
gctctagcactgttggcagatattaccagcaagtaccgtcaaggtgacagaaaagggcag

SEQ ID NO: 935 - DNA, 60 bp, Artificial Sequence
  Description of Artificial Sequence: targeting sequence/synthetic sequence
cagaccggcaccgaggaactgcggagcctgtacaacaccgtggccaccctgtactgcgtg

SEQ ID NO: 936 - DNA, 60 bp, Artificial Sequence
  Description of Artificial Sequence: targeting sequence/synthetic sequence
gttggaggaaagaaggaatatctcattgcaggaaaggccgagggggacggcaagatgcac

SEQ ID NO: 937 - DNA, 60 bp, Artificial Sequence
  Description of Artificial Sequence: targeting sequence/synthetic sequence
acggccgtgcgcctactgctacccggggaattggccaagcacgccgtgtccgagggcacc

SEQ ID NO: 938 - DNA, 60 bp, Artificial Sequence
  Description of Artificial Sequence: targeting sequence/synthetic sequence
ggcggcgttttgcctaacatccaggccgttctgttaccaaagaaaaccgaaagccacaaa

SEQ ID NO: 939 - DNA, 60 bp, Artificial Sequence
  Description of Artificial Sequence: targeting sequence/synthetic sequence
cggcctaaggtgtgtgtgctcggctcccgcgagcagctgtgcatccatcctgaggtcaag

SEQ ID NO: 940 - DNA, 60 bp, Artificial Sequence
  Description of Artificial Sequence: targeting sequence/synthetic sequence
gagaagaacggcaagaacgtgcacgtgatcggcacccacacccagagcgaggacagccgg

SEQ ID NO: 941 - DNA, 60 bp, Artificial Sequence
  Description of Artificial Sequence: targeting sequence/synthetic sequence
cacgctgggacgtacgggttgggggacaggaaagatcaggggggctacaccatgcaccaa

SEQ ID NO: 942 - DNA, 60 bp, Artificial Sequence
  Description of Artificial Sequence: targeting sequence/synthetic sequence
cagatccagcccgccatcaagaccggcaccgaggaactgaagagcctgttcaacctggtg

SEQ ID NO: 943 - DNA, 60 bp, Artificial Sequence
  Description of Artificial Sequence: targeting sequence/synthetic sequence
tctcgcctggctcactacaataagcgctcgaccatcacctccagggagattcagacggct

SEQ ID NO: 944 - DNA, 60 bp, Artificial Sequence
  Description of Artificial Sequence: targeting sequence/synthetic sequence
gtagtcctcctcacagaaatgtgtgagcgaagcccagacatgcttgcgcatttcagaaag

SEQ ID NO: 945 - DNA, 60 bp, Artificial Sequence
  Description of Artificial Sequence: targeting sequence/synthetic sequence
caggtccaccccgacaccggcatctcctctaaggccatgggaatcatgaactccttcgtc

SEQ ID NO: 946 - DNA, 60 bp, Artificial Sequence
  Description of Artificial Sequence: targeting sequence/synthetic sequence
caggtccatcccgacaccggcatctcttccaaggcaatggggatcatgaattccttcgtc

SEQ ID NO: 947 - DNA, 60 bp, Artificial Sequence
  Description of Artificial Sequence: targeting sequence/synthetic sequence
gttggattgattcgaaatcttgccctttgtcccgcaaatcatgcacctttgcgtgagcag

SEQ ID NO: 948 - DNA, 60 bp, Artificial Sequence
  Description of Artificial Sequence: targeting sequence/synthetic sequence
atcgcccagggtggtgtcctgcccaatatccaggccgtgctgctgcctaagaaaactgag

SEQ ID NO: 949 - DNA, 60 bp, Artificial Sequence
  Description of Artificial Sequence: targeting sequence/synthetic sequence
atcatcccgcgtcacctccagctggccatccgcaacgatgaggagctcaacaagcttctg

SEQ ID NO: 950 - DNA, 60 bp, Artificial Sequence
  Description of Artificial Sequence: targeting sequence/synthetic sequence
gtggtgttggagaccggcggcgaggccgggatcacccgatcggtggtggccaccactcga

SEQ ID NO: 951 - DNA, 60 bp, Artificial Sequence
  Description of Artificial Sequence: targeting sequence/synthetic sequence
gagaacaattacaagaccacaccccctgtgctggacagcgacggcagcttctttctgtac

SEQ ID NO: 952 - DNA, 60 bp, Artificial Sequence
  Description of Artificial Sequence: targeting sequence/synthetic sequence
gaggccagcgaggcctacctggtggggctgttcgaagacacgaacctgtgcgccatccac

SEQ ID NO: 953 - DNA, 60 bp, Artificial Sequence
  Description of Artificial Sequence: targeting sequence/synthetic sequence
aacgtttcacccagagactcagctgaaggaaatgacagttatccatctgggatccatctg

SEQ ID NO: 954 - DNA, 60 bp, Artificial Sequence
  Description of Artificial Sequence: targeting sequence/synthetic sequence
ctgaagcagaaggtgagccagtactatggcatccccatggccgagcggcagaacgacagc

SEQ ID NO: 955 - DNA, 60 bp, Artificial Sequence
  Description of Artificial Sequence: targeting sequence/synthetic sequence
ttcagcgtgggcagcaccctgtaccccgagagccggaagctgctcaagagctggcacctg

SEQ ID NO: 956 - DNA, 60 bp, Artificial Sequence
  Description of Artificial Sequence: targeting sequence/synthetic sequence
aagagcaactgcaggcacgagagagacgctggtgtggtctgcaccaatgaaaccaggagc

SEQ ID NO: 957 - DNA, 60 bp, Artificial Sequence
  Description of Artificial Sequence: targeting sequence/synthetic sequence
ctgacgtttaccctacgtcctggtgaggtgacggcgctggtgggacccaatgggtctggg

SEQ ID NO: 958 - DNA, 60 bp, Artificial Sequence
  Description of Artificial Sequence: targeting sequence/synthetic sequence
aactccttcgtcaacgacatctttgagcgtatcgccggagaagcgtcacgcctggcgcat

SEQ ID NO: 959 - DNA, 60 bp, Artificial Sequence
  Description of Artificial Sequence: targeting sequence/synthetic sequence
agctccctgctccgacaagacatcaccttctttgacgccaataagacagggcagctggtg

SEQ ID NO: 960 - DNA, 60 bp, Artificial Sequence
  Description of Artificial Sequence: targeting sequence/synthetic sequence
accggcatctcatcgaaggccatgggcatcatgaactccttcgtcaatgacatctttgag

SEQ ID NO: 961 - DNA, 60 bp, Artificial Sequence
  Description of Artificial Sequence: targeting sequence/synthetic sequence
tcccccggaccccactgcgcccaaaccgaagtcatagccacactcaagaatgggcagaaa

SEQ ID NO: 962 - DNA, 60 bp, Artificial Sequence
  Description of Artificial Sequence: targeting sequence/synthetic sequence
aagcagaaggtgagccagtactatggcatccccatggccgagcggcagaacaatcggtgg

SEQ ID NO: 963 - DNA, 60 bp, Artificial Sequence
  Description of Artificial Sequence: targeting sequence/synthetic sequence
atgttcagcgtgggcagcaccctgtacatcgagagccggagactgctcaagagctggcac

SEQ ID NO: 964 - DNA, 60 bp, Artificial Sequence
  Description of Artificial Sequence: targeting sequence/synthetic sequence
gtgggcgtgagcatccggaccaacaccgccttccagcccgacgccgctatgatcagcctg

SEQ ID NO: 965 - DNA, 60 bp, Artificial Sequence
  Description of Artificial Sequence: targeting sequence/synthetic sequence
ctcgagtatctgaccgccgagatcctggagctggcgggcaacgcggctcgggacaacaag

SEQ ID NO: 966 - DNA, 60 bp, Artificial Sequence
  Description of Artificial Sequence: targeting sequence/synthetic sequence
ctcttggggcgtgtgaccatcgcgcagggtggcgttttgcctaatattcaggcggtgctg

SEQ ID NO: 967 - DNA, 60 bp, Artificial Sequence
  Description of Artificial Sequence: targeting sequence/synthetic sequence
cccatcattcccgtgctgctccccaagtacatcggcctggaccccatcagccccggcgac

SEQ ID NO: 968 - DNA, 60 bp, Artificial Sequence
  Description of Artificial Sequence: targeting sequence/synthetic sequence
tcccttcgcgactccccacacagcgagaggtacgtgtcggccctgaccacgcccgcgcgc

SEQ ID NO: 969 - DNA, 60 bp, Artificial Sequence
  Description of Artificial Sequence: targeting sequence/synthetic sequence
cgccagcgtcgcgccctggagcggggtctgcaggacgaggatggctacaggatgaagttt

SEQ ID NO: 970 - DNA, 60 bp, Artificial Sequence
  Description of Artificial Sequence: targeting sequence/synthetic sequence
gcagcctccgccatctctgtggcccgcaccctgctggtctttgaagtgcagcagcccttc

SEQ ID NO: 971 - DNA, 60 bp, Artificial Sequence
  Description of Artificial Sequence: targeting sequence/synthetic sequence
ttccaacgcctggtgcgagaaatcgctcaggacttcaagacagatctgcgctttcagagt

SEQ ID NO: 972 - DNA, 60 bp, Artificial Sequence
  Description of Artificial Sequence: targeting sequence/synthetic sequence
ggtggcgttttgcctaatattcaggcggtgctgctgcctaagaaaactgagagccatcat

SEQ ID NO: 973 - DNA, 60 bp, Artificial Sequence
  Description of Artificial Sequence: targeting sequence/synthetic sequence
ctgtgcgctattcacgctaaacgcgtcaccatcatgcccaaagatatccagctggcacgt

SEQ ID NO: 974 - DNA, 60 bp, Artificial Sequence
  Description of Artificial Sequence: targeting sequence/synthetic sequence
gcctccctgggctccgcgccccgcagccctgccccccgcgaaggccccccgcctgtcctg

SEQ ID NO: 975 - DNA, 60 bp, Artificial Sequence
  Description of Artificial Sequence: targeting sequence/synthetic sequence
atcccctatcgtgagaacaagaacctcacggggacggcgcggtacgcctccatcaacacg

SEQ ID NO: 976 - DNA, 60 bp, Artificial Sequence
  Description of Artificial Sequence: targeting sequence/synthetic sequence
ttcaagaccgacctgcgcttccagagctcggctgtgatggcgctgcaggaggcctgcgag

SEQ ID NO: 977 - DNA, 60 bp, Artificial Sequence
  Description of Artificial Sequence: targeting sequence/synthetic sequence
aaagtcaccatcgcccagggcggcgtcttgcctaacatccaggccgtactgctccctaag

SEQ ID NO: 978 - DNA, 60 bp, Artificial Sequence
  Description of Artificial Sequence: targeting sequence/synthetic sequence
tacatctttcacagtgggaccaccctttataatccctccctcgagagtcgagtcaccatg

SEQ ID NO: 979 - DNA, 60 bp, Artificial Sequence
  Description of Artificial Sequence: targeting sequence/synthetic sequence
actgtttgtctgaaagctggtttggagaccacagcttggactaaattcagtcatctggct

SEQ ID NO: 980 - DNA, 60 bp, Artificial Sequence
  Description of Artificial Sequence: targeting sequence/synthetic sequence
ttcaccgaggcctgcaacgccgctcggggcctggagtggatcggcaacaagatcagcaag

SEQ ID NO: 981 - DNA, 60 bp, Artificial Sequence
  Description of Artificial Sequence: targeting sequence/synthetic sequence
gttgttgttactgtttgtctgaaagctggtttggagaccacagcttggactaaattcagt

SEQ ID NO: 982 - DNA, 60 bp, Artificial Sequence
  Description of Artificial Sequence: targeting sequence/synthetic sequence
aagactcgcatcatcccgcgccacttgcagctggccatccgcaacgacgaggagctcaac

SEQ ID NO: 983 - DNA, 60 bp, Artificial Sequence
  Description of Artificial Sequence: targeting sequence/synthetic sequence
agagctgtgtctgaacatcagctcctccatgacaaggggaagtccatccaagatttacgg

SEQ ID NO: 984 - DNA, 60 bp, Artificial Sequence
  Description of Artificial Sequence: targeting sequence/synthetic sequence
aaggtgtgtgtgctcggctcccgcgagcagctgtgcatccatcctgaggtcaagaaacaa

SEQ ID NO: 985 - DNA, 60 bp, Artificial Sequence
  Description of Artificial Sequence: targeting sequence/synthetic sequence
aagggcaactactccgagcgagtcggggccggcgcgccagtgtatctggcggcggtgttg

SEQ ID NO: 986 - DNA, 60 bp, Artificial Sequence
  Description of Artificial Sequence: targeting sequence/synthetic sequence
gctgtgtctgaacatcagctcctccatgacaaggggaagtccatccaagatttacggcga

SEQ ID NO: 987 - DNA, 60 bp, Artificial Sequence
  Description of Artificial Sequence: targeting sequence/synthetic sequence
aagcttctaggtcgcgtgaccatcgcgcagggcggtgtcctgcccaacatccaggccgta

SEQ ID NO: 988 - DNA, 60 bp, Artificial Sequence
  Description of Artificial Sequence: targeting sequence/synthetic sequence
atcgccggcgaggcttcccgcctggcgcattacaacaagcgctcgaccatcacctccagg

SEQ ID NO: 989 - DNA, 60 bp, Artificial Sequence
  Description of Artificial Sequence: targeting sequence/synthetic sequence
tgcgcccaaaccgaagtcatagccacactcaagaatgggcggaaagcttgcctcaatcct

SEQ ID NO: 990 - DNA, 60 bp, Artificial Sequence
  Description of Artificial Sequence: targeting sequence/synthetic sequence
gcctgcgaggcctacctggtggggctgtttgaggacaccaacctatgcgccattcacgcc

SEQ ID NO: 991 - DNA, 60 bp, Artificial Sequence
  Description of Artificial Sequence: targeting sequence/synthetic sequence
ctgggcaaagtaaccatcgctcagggtggtgtcctgcccaacatccaggctgtgctactg

SEQ ID NO: 992 - DNA, 60 bp, Artificial Sequence
  Description of Artificial Sequence: targeting sequence/synthetic sequence
gggcgtgtgaccatcgcgcagggtggcgttttgcctaatattcaggcggtgctgctgcct

SEQ ID NO: 993 - DNA, 60 bp, Artificial Sequence
  Description of Artificial Sequence: targeting sequence/synthetic sequence
cccaagaaaatcaagccccctctgcccagcgtgcggaagctggtggaggaccggtggaac

SEQ ID NO: 994 - DNA, 60 bp, Artificial Sequence
  Description of Artificial Sequence: targeting sequence/synthetic sequence
aagaaggaatatctcattgcaggaaaggccgagggggacggcaagatgcacatcaccctc

SEQ ID NO: 995 - DNA, 60 bp, Artificial Sequence
  Description of Artificial Sequence: targeting sequence/synthetic sequence
acggtcaccgccatggatgtggtctacgcgctcaagcgccagggccgcaccctctacggt

SEQ ID NO: 996 - DNA, 60 bp, Artificial Sequence
  Description of Artificial Sequence: targeting sequence/synthetic sequence
ttcgagcgcatcgccagcgaggcctcccgcctggcacactacaacaagcgctccaccatc

SEQ ID NO: 997 - DNA, 60 bp, Artificial Sequence
  Description of Artificial Sequence: targeting sequence/synthetic sequence
ttgctgcgcaaaggcaactacgcggagcgagtgggggccggcgcgcccgtctacatggct

SEQ ID NO: 998 - DNA, 60 bp, Artificial Sequence
  Description of Artificial Sequence: targeting sequence/synthetic sequence
gcagcggtgctggaatatctgacggccgagatcttagagctagctggcaacgcggctcgc

SEQ ID NO: 999 - DNA, 60 bp, Artificial Sequence
  Description of Artificial Sequence: targeting sequence/synthetic sequence
agaaagctgccttttcagcgtctggtgcgtgagatcgcgcaggacttcaagaccgacttg

SEQ ID NO: 1000 - DNA, 60 bp, Artificial Sequence
  Description of Artificial Sequence: targeting sequence/synthetic sequence
ctgggcatgtacctggagttccagtacagcttcgagatgtgcctgaagtgcatcaagaaa

SEQ ID NO: 1001 - DNA, 60 bp, Artificial Sequence
  Description of Artificial Sequence: targeting sequence/synthetic sequence
ctgctcctgctcggcatgtacctggagttccagtacagcttcgagatgtgcctgaagtgc

SEQ ID NO: 1002 - DNA, 60 bp, Artificial Sequence
  Description of Artificial Sequence: targeting sequence/synthetic sequence
caggccttgactggtgaggcccaaagccggtggccccgcagaggcgggagtggggccatg

SEQ ID NO: 1003 - DNA, 60 bp, Artificial Sequence
  Description of Artificial Sequence: targeting sequence/synthetic sequence
ttccagaggttggtgagggagatcgcgcaggatttcaaaaccgacctgaggtttcagagc

SEQ ID NO: 1004 - DNA, 60 bp, Artificial Sequence
  Description of Artificial Sequence: targeting sequence/synthetic sequence
gagttggattctcttatcaaggctaccatagctgggggtggtgtgatccctcacatccac

SEQ ID NO: 1005 - DNA, 60 bp, Artificial Sequence
  Description of Artificial Sequence: targeting sequence/synthetic sequence
aaggctactgttggattgattcgaaatcttgccctttgtcccgcaaatcatgcacctttg

SEQ ID NO: 1006 - DNA, 60 bp, Artificial Sequence
  Description of Artificial Sequence: targeting sequence/synthetic sequence
cacatcccctatcgtgagaacaagaacctcacggggacggcgcggtacgcctccatcaac

SEQ ID NO: 1007 - DNA, 60 bp, Artificial Sequence
  Description of Artificial Sequence: targeting sequence/synthetic sequence
gtcacagccatggacgtggtgtacgcgctcaagcgccagggacgcactctttatggcttc

SEQ ID NO: 1008 - DNA, 60 bp, Artificial Sequence
  Description of Artificial Sequence: targeting sequence/synthetic sequence
tgcgtggtggtggacgtgagccacgaagaccctgaggtcaagttcaactggtacgtggac

SEQ ID NO: 1009 - DNA, 60 bp, Artificial Sequence
  Description of Artificial Sequence: targeting sequence/synthetic sequence
aagctgccttttcagcgtctggtgcgtgagatcgcgcaggacttcaagaccgacttgcgc

SEQ ID NO: 1010 - DNA, 60 bp, Artificial Sequence
  Description of Artificial Sequence: targeting sequence/synthetic sequence
tttagttactcctcaggccatgttcatttatcctcagagaataaattccaaaactctgca

SEQ ID NO: 1011 - DNA, 60 bp, Artificial Sequence
  Description of Artificial Sequence: targeting sequence/synthetic sequence
cgacaagacatcaccttctttgacgccaataagacagggcagctggtgagccgcttgaca

SEQ ID NO: 1012 - DNA, 60 bp, Artificial Sequence
  Description of Artificial Sequence: targeting sequence/synthetic sequence
cagcgttatgagatcaagatgaccaagatgtataaagggttccaagccttaggggatgcc

SEQ ID NO: 1013 - DNA, 60 bp, Artificial Sequence
  Description of Artificial Sequence: targeting sequence/synthetic sequence
ttcaccgagatgaccaacgcctgcaagggcatggagtggatcgccatcaagatccagaag

SEQ ID NO: 1014 - DNA, 60 bp, Artificial Sequence
  Description of Artificial Sequence: targeting sequence/synthetic sequence
ctgaagaccggcagcgaggaactgaccagcctgtacaacaccgtggccaccctgtactgc

SEQ ID NO: 1015 - DNA, 60 bp, Artificial Sequence
  Description of Artificial Sequence: targeting sequence/synthetic sequence
ctcctcacagaaatgtgtgagcgaagcccagacatgcttgcgcatttcagaaagaatgaa

SEQ ID NO: 1016 - DNA, 60 bp, Artificial Sequence
  Description of Artificial Sequence: targeting sequence/synthetic sequence
ccctgcaacctaacccgctacaacaaagagctctccatggtgaagatccccagcaagaca

SEQ ID NO: 1017 - DNA, 60 bp, Artificial Sequence
  Description of Artificial Sequence: targeting sequence/synthetic sequence
ctcggctcccgcgagcagctgtgcatccatcctgaggtcaagaaacaagagagtaaccat

SEQ ID NO: 1018 - DNA, 60 bp, Artificial Sequence
  Description of Artificial Sequence: targeting sequence/synthetic sequence
gtggggcttttcgaggacaccaacctgtgcgctattcatgccaaacgcgtgaccatcatg

SEQ ID NO: 1019 - DNA, 60 bp, Artificial Sequence
  Description of Artificial Sequence: targeting sequence/synthetic sequence
ttggattctctcatcaaggctacaattgctggtggtggtgtcattccacacatccacaaa

SEQ ID NO: 1020 - DNA, 60 bp, Artificial Sequence
  Description of Artificial Sequence: targeting sequence/synthetic sequence
ttcgtcaacgacatcttcgagcgcatcgcgggcgaggcttctcgcctggctcactacaat

SEQ ID NO: 1021 - DNA, 60 bp, Artificial Sequence
  Description of Artificial Sequence: targeting sequence/synthetic sequence
aactatgcagagcggataggggcaggcgcaccagtgtatttggcggcagtgttagagtat

SEQ ID NO: 1022 - DNA, 60 bp, Artificial Sequence
  Description of Artificial Sequence: targeting sequence/synthetic sequence
tacaccatcaacctcatcatcccctgcctgctcatctcctgcctcaccgtgctggtcttc

SEQ ID NO: 1023 - DNA, 60 bp, Artificial Sequence
  Description of Artificial Sequence: targeting sequence/synthetic sequence
gaggtcacatgcgtggtggtggacgtgagccacgaagaccctgaggtcaagttcaactgg

SEQ ID NO: 1024 - DNA, 60 bp, Artificial Sequence
  Description of Artificial Sequence: targeting sequence/synthetic sequence
cagcccatcattcccgtgctgctccccaagtacatcggcctggaccccatcagccccggc

SEQ ID NO: 1025 - DNA, 60 bp, Artificial Sequence
  Description of Artificial Sequence: targeting sequence/synthetic sequence
accatcaacctcatcatcccctgcctgctcatctcctgcctcaccgtgctggtcttctac

SEQ ID NO: 1026 - DNA, 60 bp, Artificial Sequence
  Description of Artificial Sequence: targeting sequence/synthetic sequence
atccggaagctgccgtttcagcgcctggtgcgagaaatagctcaggacttcaagaccgac

SEQ ID NO: 1027 - DNA, 60 bp, Artificial Sequence
  Description of Artificial Sequence: targeting sequence/synthetic sequence
gcggcggtgttagagtacctgaccgccgagatcctggagctggccggcaacgcggctcgc

SEQ ID NO: 1028 - DNA, 60 bp, Artificial Sequence
  Description of Artificial Sequence: targeting sequence/synthetic sequence
gacaccatatctgagaaaacatctgatcagatccacttcttctttgccaaactgaactgc

SEQ ID NO: 1029 - DNA, 60 bp, Artificial Sequence
  Description of Artificial Sequence: targeting sequence/synthetic sequence
agcatccagaccggcaccgccttccagcccgacgccgctatgatcagcctggagaacaat

SEQ ID NO: 1030 - DNA, 60 bp, Artificial Sequence
  Description of Artificial Sequence: targeting sequence/synthetic sequence
ggctccgcgccccgcagccctgccccccgcgaaggccccccgcctgtcctggcgtccccc

SEQ ID NO: 1031 - DNA, 60 bp, Artificial Sequence
  Description of Artificial Sequence: targeting sequence/synthetic sequence
cgcgactccccacacagcgagaggtacgtgtcggccctgaccacgcccgcgcgcctctcg

SEQ ID NO: 1032 - DNA, 60 bp, Artificial Sequence
  Description of Artificial Sequence: targeting sequence/synthetic sequence
ctctgcaggacaccctgcaacctaacccgctacaacaaagagctctccatggtgaagatc

SEQ ID NO: 1033 - DNA, 60 bp, Artificial Sequence
  Description of Artificial Sequence: targeting sequence/synthetic sequence
aacccccctggctacctgctcggcaagatcaacctgaaggccctggccgctctggccaag

SEQ ID NO: 1034 - DNA, 60 bp, Artificial Sequence
  Description of Artificial Sequence: targeting sequence/synthetic sequence
gtaaatgggaataatatccgaggcatgatgaaagaattactttattttctggattcgtgt

SEQ ID NO: 1035 - DNA, 60 bp, Artificial Sequence
  Description of Artificial Sequence: targeting sequence/synthetic sequence
cgcgccctggagcggggtctgcaggacgaggatggctacaggatgaagtttgcctgctac

SEQ ID NO: 1036 - DNA, 60 bp, Artificial Sequence
  Description of Artificial Sequence: targeting sequence/synthetic sequence
gtgtgtgaaatgccttgcaacctgacccgctatggcaaagagctgtccatggtcaagatc

SEQ ID NO: 1037 - DNA, 60 bp, Artificial Sequence
  Description of Artificial Sequence: targeting sequence/synthetic sequence
gaggcggctgcagcctccgccatctctgtggcccgcaccctgctggtctttgaagtgcag

SEQ ID NO: 1038 - DNA, 60 bp, Artificial Sequence
  Description of Artificial Sequence: targeting sequence/synthetic sequence
cggcttcagtctggggaggaggaggaagagcagatccacagcactggtcttgagtatcct

SEQ ID NO: 1039 - DNA, 60 bp, Artificial Sequence
  Description of Artificial Sequence: targeting sequence/synthetic sequence
aacctgtgtgctatccacgccaagcgagtgactatcatgcccaaggacatccagctcgct

SEQ ID NO: 1040 - DNA, 60 bp, Artificial Sequence
  Description of Artificial Sequence: targeting sequence/synthetic sequence
taccagcgttatgagatcaagatgaccaagatgtataaagggttccaagccttaggggat

SEQ ID NO: 1041 - DNA, 60 bp, Artificial Sequence
  Description of Artificial Sequence: targeting sequence/synthetic sequence
tttgccctggtaaatgggaataatatccgaggcatgatgaaagaattactttattttctg

SEQ ID NO: 1042 - DNA, 60 bp, Artificial Sequence
  Description of Artificial Sequence: targeting sequence/synthetic sequence
gtgcagcgggagaagcgggccgctggcctgggcgccctgttcctgggcttcctgggcgac

SEQ ID NO: 1043 - DNA, 60 bp, Artificial Sequence
  Description of Artificial Sequence: targeting sequence/synthetic sequence
tgtgaggcctacttggtagggctctttgaggacacaaacctttgcgccatccatgctaag

SEQ ID NO: 1044 - DNA, 60 bp, Artificial Sequence
  Description of Artificial Sequence: targeting sequence/synthetic sequence
gagaaaacatctgatcagatccacttcttctttgccaaactgaactgccgactctatcga

SEQ ID NO: 1045 - DNA, 60 bp, Artificial Sequence
  Description of Artificial Sequence: targeting sequence/synthetic sequence
ggcggagtgtgccccgccatcctgaagaaatgccggagagacagcgactgccccggcgcc

SEQ ID NO: 1046 - DNA, 60 bp, Artificial Sequence
  Description of Artificial Sequence: targeting sequence/synthetic sequence
tctggggaggaggaggaagagcagatccacagcactggtcttgagtatcctgagcgcccg

SEQ ID NO: 1047 - DNA, 60 bp, Artificial Sequence
  Description of Artificial Sequence: targeting sequence/synthetic sequence
cccaagatcctgaagaaatgccggagagacagcgactgccccggcgcctgcatctgccgg

SEQ ID NO: 1048 - DNA, 60 bp, Artificial Sequence
  Description of Artificial Sequence: targeting sequence/synthetic sequence
cacagtgggagcaccacctacaacccctccctcaagagtcgagtcaccctttcactagac

SEQ ID NO: 1049 - DNA, 60 bp, Artificial Sequence
  Description of Artificial Sequence: targeting sequence/synthetic sequence
gtgctaaagcaggtccatccggacactggcatctcttcgaaagctatgagcattatgaat

SEQ ID NO: 1050 - DNA, 60 bp, Artificial Sequence
  Description of Artificial Sequence: targeting sequence/synthetic sequence
gtgtacaaggtgctgaaacaggtccaccccgacaccggcatctcctctaaagccatgggg

SEQ ID NO: 1051 - DNA, 60 bp, Artificial Sequence
  Description of Artificial Sequence: targeting sequence/synthetic sequence
gaaatcaatcatagtggaagcaccaactacaacccgtccctcaagagtcgagtcaccata

SEQ ID NO: 1052 - DNA, 60 bp, Artificial Sequence
  Description of Artificial Sequence: targeting sequence/synthetic sequence
tacaaggtgctgaagcaggtccaccccgacaccggcatctcttccaaggctatgggaatc

SEQ ID NO: 1053 - DNA, 60 bp, Artificial Sequence
  Description of Artificial Sequence: targeting sequence/synthetic sequence
caagtccaccccgacaccggcatctcctccaaagccatggggatcatgaattcctttgtc

SEQ ID NO: 1054 - DNA, 60 bp, Artificial Sequence
  Description of Artificial Sequence: targeting sequence/synthetic sequence
caggtccaccccgacaccggcatctcatccaaggccatggggatcatgaattccttcgtc

SEQ ID NO: 1055 - DNA, 60 bp, Artificial Sequence
  Description of Artificial Sequence: targeting sequence/synthetic sequence
caccctgacaccggcatttcgtccaaggccatgggcatcatgaattcgtttgtgaacgac

SEQ ID NO: 1056 - DNA, 60 bp, Artificial Sequence
  Description of Artificial Sequence: targeting sequence/synthetic sequence
tatgtgtacaaggttctgaagcaggtccaccctgacaccggcatttcgtccaaggccatg

SEQ ID NO: 1057 - DNA, 60 bp, Artificial Sequence
  Description of Artificial Sequence: targeting sequence/synthetic sequence
tacaaggtgctgaagcaggtccaccccgacaccggcatctcttctaaggccatgggaatc

SEQ ID NO: 1058 - DNA, 60 bp, Artificial Sequence
  Description of Artificial Sequence: targeting sequence/synthetic sequence
caccccgacaccggcatctcgtccaaggccatgggcatcatgaactccttcgtcaatgac

SEQ ID NO: 1059 - DNA, 60 bp, Artificial Sequence
  Description of Artificial Sequence: targeting sequence/synthetic sequence
ggtggcgtcctgcccaacatccaggccgtactgctgcccaagaagacggagagccaccac

SEQ ID NO: 1060 - DNA, 60 bp, Artificial Sequence
  Description of Artificial Sequence: targeting sequence/synthetic sequence
ggggaaatctatcatagtgggagcaccaactacaacccgtccctcaagagtcgagtcacc

SEQ ID NO: 1061 - DNA, 60 bp, Artificial Sequence
  Description of Artificial Sequence: targeting sequence/synthetic sequence
ggtggtgtcctgcccaacatccaggctgtgctactgcccaagaagaccgagagtcaccac

SEQ ID NO: 1062 - DNA, 60 bp, Artificial Sequence
  Description of Artificial Sequence: targeting sequence/synthetic sequence
gtgtacgtgtacaaggtgctgaagcaggtccaccccgacaccggtatctcgtccaaggcc

SEQ ID NO: 1063 - DNA, 60 bp, Artificial Sequence
  Description of Artificial Sequence: targeting sequence/synthetic sequence
gtgtacgtgtacaaggtgctaaagcaggtccaccccgacaccggcatctcatccaaggcc

SEQ ID NO: 1064 - DNA, 60 bp, Artificial Sequence
  Description of Artificial Sequence: targeting sequence/synthetic sequence
cggggcgacgaggtgcggcagatcgcccccggccagaccggcaagatcgccgactacaac

SEQ ID NO: 1065 - DNA, 60 bp, Artificial Sequence
  Description of Artificial Sequence: targeting sequence/synthetic sequence
atagatgtccgaaacagcacgcaacatttaggaccagtacatcgtgaaaaagccgagata

SEQ ID NO: 1066 - DNA, 60 bp, Artificial Sequence
  Description of Artificial Sequence: targeting sequence/synthetic sequence
acatcccaccatgatcaggatcacccaaccttcaacaagatcacccccaacctggctgag

SEQ ID NO: 1067 - DNA, 60 bp, Artificial Sequence
  Description of Artificial Sequence: targeting sequence/synthetic sequence
cggttcgtgcagaacgccctgaacggcaacggcgaccccaacaatatggacaaggccgtg

SEQ ID NO: 1068 - DNA, 60 bp, Artificial Sequence
  Description of Artificial Sequence: targeting sequence/synthetic sequence
tctcccgccaacggctcgctggggcccacgttgaacctgagcagcggggagtcgcgcctg

SEQ ID NO: 1069 - DNA, 60 bp, Artificial Sequence
  Description of Artificial Sequence: targeting sequence/synthetic sequence
acagatttgattcaggcaaatcctaaacaaggcgcgttagcgaaaaagtcatctcaaacg

SEQ ID NO: 1070 - DNA, 60 bp, Artificial Sequence
  Description of Artificial Sequence: targeting sequence/synthetic sequence
caggacacgcaggagaagctcaaccaccagcttgagggcctgaccttccagatgaagaag

SEQ ID NO: 1071 - DNA, 60 bp, Artificial Sequence
  Description of Artificial Sequence: targeting sequence/synthetic sequence
cagagacaggggactcaggcggaatccaacctgagtagtaaattccagttttccagcaac

SEQ ID NO: 1072 - DNA, 60 bp, Artificial Sequence
  Description of Artificial Sequence: targeting sequence/synthetic sequence
cttgagaatgaaataccaaaaacgtctggcagcgagatggcaaacaaacgtatgaaagta

SEQ ID NO: 1073 - DNA, 60 bp, Artificial Sequence
  Description of Artificial Sequence: targeting sequence/synthetic sequence
tcagaagtatctacagatttgattcaggcaaatcctaaacaaggcgcgttagcgaaaaag

SEQ ID NO: 1074 - DNA, 60 bp, Artificial Sequence
  Description of Artificial Sequence: targeting sequence/synthetic sequence
aaccacacttctggggcaggcctggtgcaaatcaacaaaagtaatgggaaggagacagtg

SEQ ID NO: 1075 - DNA, 60 bp, Artificial Sequence
  Description of Artificial Sequence: targeting sequence/synthetic sequence
agctcacgaggcactacaggaaacacacaggtgcaaagcccttcaaatgcaaccactgcg

SEQ ID NO: 1076 - DNA, 60 bp, Artificial Sequence
  Description of Artificial Sequence: targeting sequence/synthetic sequence
cagatcattaagcagctgcagcccgccctgcagaccggcaccgaggaactgaagagcctg

SEQ ID NO: 1077 - DNA, 60 bp, Artificial Sequence
  Description of Artificial Sequence: targeting sequence/synthetic sequence
ccccatgccaatgaggtgagccagaagatcggggacaacctgcgagagcttcagcagcgc

SEQ ID NO: 1078 - DNA, 60 bp, Artificial Sequence
  Description of Artificial Sequence: targeting sequence/synthetic sequence
agcgagaggagcagcagcagcagcagcagcagcagcgagagcggcagcagcagcaggagc

SEQ ID NO: 1079 - DNA, 60 bp, Artificial Sequence
  Description of Artificial Sequence: targeting sequence/synthetic sequence
ccagatcgcaatgcaactactttgggattgcctaacaactcgaataattcttcactactg

SEQ ID NO: 1080 - DNA, 60 bp, Artificial Sequence
  Description of Artificial Sequence: targeting sequence/synthetic sequence
aatggcgaagctgtgaaaacccacaccaacatctccgagagccaccccaatgccactttc

SEQ ID NO: 1081 - DNA, 60 bp, Artificial Sequence
  Description of Artificial Sequence: targeting sequence/synthetic sequence
tccagcttgccgacaaccaactcaacaaccaattcagccaccaaaataacagctaatacc

SEQ ID NO: 1082 - DNA, 60 bp, Artificial Sequence
  Description of Artificial Sequence: targeting sequence/synthetic sequence
gttgtcttctccaatgaccacagcagtgggaccaaggagaccaggctggagctgagggag

SEQ ID NO: 1083 - DNA, 60 bp, Artificial Sequence
  Description of Artificial Sequence: targeting sequence/synthetic sequence
acagatacatcccaccatgatcaggatcacccaaccttcaacaagatcacccccaacctg

SEQ ID NO: 1084 - DNA, 60 bp, Artificial Sequence
  Description of Artificial Sequence: targeting sequence/synthetic sequence
gccagacttgagaatgaaataccaaaaacgtctggcagcgagatggcaaacaaacgtatg

SEQ ID NO: 1085 - DNA, 60 bp, Artificial Sequence
  Description of Artificial Sequence: targeting sequence/synthetic sequence
cgggaagctggcaaccacacttctggggcaggcctggtgcaaatcaacaaaagtaatggg

SEQ ID NO: 1086 - DNA, 60 bp, Artificial Sequence
  Description of Artificial Sequence: targeting sequence/synthetic sequence
ctgagcctgcccaagccccagagcaacctgcccgacaccaaggccagcggccccgcccac

SEQ ID NO: 1087 - DNA, 60 bp, Artificial Sequence
  Description of Artificial Sequence: targeting sequence/synthetic sequence
gtgatcagcaacgccctgcagctgagccagcccaagccccagaagcagctgaccgcccag

SEQ ID NO: 1088 - DNA, 60 bp, Artificial Sequence
  Description of Artificial Sequence: targeting sequence/synthetic sequence
tacttcagccagctgagcaacaatgccaaggaggccgtggaacatctccagaaatctgaa

SEQ ID NO: 1089 - DNA, 60 bp, Artificial Sequence
  Description of Artificial Sequence: targeting sequence/synthetic sequence
caggcgcagttggtggagtctgggggaggcgtggtccagcccgggagctccctgagactc

SEQ ID NO: 1090 - DNA, 60 bp, Artificial Sequence
  Description of Artificial Sequence: targeting sequence/synthetic sequence
ggcaaccacacttctggggcaggcctggtgcaaatcaacaaaagtaatgggaaggagaca

SEQ ID NO: 1091 - DNA, 60 bp, Artificial Sequence
  Description of Artificial Sequence: targeting sequence/synthetic sequence
acacaggagaccatcgaccgcttggcgggtaaacccacccatgtcaatgtgtctgttgtc

SEQ ID NO: 1092 - DNA, 60 bp, Artificial Sequence
  Description of Artificial Sequence: targeting sequence/synthetic sequence
gcccggctgctgccccatgccaatgaggtgagccagaagatcggggacaacctgcgagag

SEQ ID NO: 1093 - DNA, 60 bp, Artificial Sequence
  Description of Artificial Sequence: targeting sequence/synthetic sequence
atccggggcgacgaggtgcggcagatcgcccccggccagaccggcaagatcgccgactac

SEQ ID NO: 1094 - DNA, 60 bp, Artificial Sequence
  Description of Artificial Sequence: targeting sequence/synthetic sequence
acaatgccaaaccactctgaaaccatcagtcacactgtgaacgtgcccctgcagacgacc

SEQ ID NO: 1095 - DNA, 60 bp, Artificial Sequence
  Description of Artificial Sequence: targeting sequence/synthetic sequence
gcagtgatcaatggctctcagcatccatcatcatcgtcgtctgtcaatgatgtgtcttca

SEQ ID NO: 1096 - DNA, 60 bp, Artificial Sequence
  Description of Artificial Sequence: targeting sequence/synthetic sequence
gccaacggctcgctggggcccacgttgaacctgagcagcggggagtcgcgcctgctggcg

SEQ ID NO: 1097 - DNA, 60 bp, Artificial Sequence
  Description of Artificial Sequence: targeting sequence/synthetic sequence
gagggtgcagagccattgaagcagagagtggaagcctccatctcaaaggcaaactcattt

SEQ ID NO: 1098 - DNA, 60 bp, Artificial Sequence
  Description of Artificial Sequence: targeting sequence/synthetic sequence
gacaccgtgatcagcaacgccctgcagctgagccagcccaagccccagaagcagctgacc

SEQ ID NO: 1099 - DNA, 60 bp, Artificial Sequence
  Description of Artificial Sequence: targeting sequence/synthetic sequence
cgtaacctggagcagctgggaggcactgtcaccaaccccgggggctcggggacctccagc

SEQ ID NO: 1100 - DNA, 60 bp, Artificial Sequence
  Description of Artificial Sequence: targeting sequence/synthetic sequence
atattagcacaggttgccactaatactgagactagtaaaaatgtaggaaatgctattctt

SEQ ID NO: 1101 - DNA, 60 bp, Artificial Sequence
  Description of Artificial Sequence: targeting sequence/synthetic sequence
gatacatcccaccatgatcaggatcacccaaccttcaacaagatcacccccaacctggct

SEQ ID NO: 1102 - DNA, 60 bp, Artificial Sequence
  Description of Artificial Sequence: targeting sequence/synthetic sequence
gcgcagttggtggagtctgggggaggcgtggtccagcccgggagctccctgagactctcc

SEQ ID NO: 1103 - DNA, 60 bp, Artificial Sequence
  Description of Artificial Sequence: targeting sequence/synthetic sequence
ccatctacacagtttgatgctgctcatcccactaatgtccagcgtttggctgaaccatca

SEQ ID NO: 1104 - DNA, 60 bp, Artificial Sequence
  Description of Artificial Sequence: targeting sequence/synthetic sequence
atcagcaacgccctgcagctgagccagcccaagccccagaagcagctgaccgcccagagc

SEQ ID NO: 1105 - DNA, 60 bp, Artificial Sequence
  Description of Artificial Sequence: targeting sequence/synthetic sequence
cagctgggccaggagactgacaagcttaaaaccagaaatcgagaatccatttctctgctc

SEQ ID NO: 1106 - DNA, 60 bp, Artificial Sequence
  Description of Artificial Sequence: targeting sequence/synthetic sequence
aatcaacaggaaggaatcattacagtaacagatatgaaaggaaataattcccacattctt

SEQ ID NO: 1107 - DNA, 60 bp, Artificial Sequence
  Description of Artificial Sequence: targeting sequence/synthetic sequence
gaagaggtgaatgtaattcctccacacactccagttaggactgttatgaacactatccaa

SEQ ID NO: 1108 - DNA, 60 bp, Artificial Sequence
  Description of Artificial Sequence: targeting sequence/synthetic sequence
atcgacaccgtgatcagcaacgccctgcagctgagccagcccaagccccagaagcagctg

SEQ ID NO: 1109 - DNA, 60 bp, Artificial Sequence
  Description of Artificial Sequence: targeting sequence/synthetic sequence
cgaggcactacaggaaacacacaggtgcaaagcccttcaaatgcaaccactgcgacaggt

SEQ ID NO: 1110 - DNA, 60 bp, Artificial Sequence
  Description of Artificial Sequence: targeting sequence/synthetic sequence
gtgctgaacgaggtgctggtggtccccaacatcaaggagagccaccataccacaagcaac

SEQ ID NO: 1111 - DNA, 60 bp, Artificial Sequence
  Description of Artificial Sequence: targeting sequence/synthetic sequence
ctggatggggagacgaaccttaaaatacgtcagggtttgagtcacactgctgacatgcaa

SEQ ID NO: 1112 - DNA, 60 bp, Artificial Sequence
  Description of Artificial Sequence: targeting sequence/synthetic sequence
gagttctccgtggacgagaccggccagatgagcgccacagccaagggccgagtccgtctt

SEQ ID NO: 1113 - DNA, 60 bp, Artificial Sequence
  Description of Artificial Sequence: targeting sequence/synthetic sequence
actacaggaaacacacaggtgcaaagcccttcaaatgcaaccactgcgacaggtgttttt

SEQ ID NO: 1114 - DNA, 60 bp, Artificial Sequence
  Description of Artificial Sequence: targeting sequence/synthetic sequence
tccgtggacgagaccggccagatgagcgccacagccaagggccgagtccgtcttttgaat

SEQ ID NO: 1115 - DNA, 60 bp, Artificial Sequence
  Description of Artificial Sequence: targeting sequence/synthetic sequence
gccggccagagacaggggactcaggcggaatccaacctgagtagtaaattccagttttcc

SEQ ID NO: 1116 - DNA, 60 bp, Artificial Sequence
  Description of Artificial Sequence: targeting sequence/synthetic sequence
cagtctctaacccagggagatggcgtggccaaactcagcatcaacacacaccccagccag

SEQ ID NO: 1117 - DNA, 60 bp, Artificial Sequence
  Description of Artificial Sequence: targeting sequence/synthetic sequence
agcctgcccaagccccagagcaacctgcccgacaccaaggccagcggccccgcccacagc

SEQ ID NO: 1118 - DNA, 60 bp, Artificial Sequence
  Description of Artificial Sequence: targeting sequence/synthetic sequence
gaagctgtgaaaacccacaccaacatctccgagagccaccccaatgccactttcagcgcc

SEQ ID NO: 1119 - DNA, 60 bp, Artificial Sequence
  Description of Artificial Sequence: targeting sequence/synthetic sequence
gaggtgatcgtggagaagaccaagcagaccctggccagcgtgagctccggccccaagcac

SEQ ID NO: 1120 - DNA, 60 bp, Artificial Sequence
  Description of Artificial Sequence: targeting sequence/synthetic sequence
gaagctggcaaccacacttctggggcaggcctggtgcaaatcaacaaaagtaatgggaag

SEQ ID NO: 1121 - DNA, 60 bp, Artificial Sequence
  Description of Artificial Sequence: targeting sequence/synthetic sequence
gctaatctggatggggagacgaaccttaaaatacgtcagggtttgagtcacactgctgac

SEQ ID NO: 1122 - DNA, 60 bp, Artificial Sequence
  Description of Artificial Sequence: targeting sequence/synthetic sequence
aacatgatccagaccaagccaacaggaacccagcaatcgaccaatacagctgtgactctg

SEQ ID NO: 1123 - DNA, 60 bp, Artificial Sequence
  Description of Artificial Sequence: targeting sequence/synthetic sequence
gcgccccataaggtggtggagcggacacagaacgtcactgagaaggtcacccaggtcctg

SEQ ID NO: 1124 - DNA, 60 bp, Artificial Sequence
  Description of Artificial Sequence: targeting sequence/synthetic sequence
atcaccggcgacgcccaggccaacgtgctgcggggcgccggcggagccgacgtgctggcc

SEQ ID NO: 1125 - DNA, 60 bp, Artificial Sequence
  Description of Artificial Sequence: targeting sequence/synthetic sequence
aatgaacatacatccaaaatcacaactggaggtgatgttattaataatggtctatggaat

SEQ ID NO: 1126 - DNA, 60 bp, Artificial Sequence
  Description of Artificial Sequence: targeting sequence/synthetic sequence
attgtggccagacaagggatgggggacatggctgtgtccaactccattgggagcaacgtg

SEQ ID NO: 1127 - DNA, 60 bp, Artificial Sequence
  Description of Artificial Sequence: targeting sequence/synthetic sequence
gtgcagaacgccctgaacggcaacggcgaccccaacaatatggacaaggccatcaagctg

SEQ ID NO: 1128 - DNA, 60 bp, Artificial Sequence
  Description of Artificial Sequence: targeting sequence/synthetic sequence
ggtgcagagccattgaagcagagagtggaagcctccatctcaaaggcaaactcatttttg

SEQ ID NO: 1129 - DNA, 60 bp, Artificial Sequence
  Description of Artificial Sequence: targeting sequence/synthetic sequence
tctacagatttgattcaggcaaatcctaaacaaggcgcgttagcgaaaaagtcatctcaa

SEQ ID NO: 1130 - DNA, 60 bp, Artificial Sequence
  Description of Artificial Sequence: targeting sequence/synthetic sequence
cagaagcacctagcagagctgaatcaccagaagcagctggagtccaataagatcccagag

SEQ ID NO: 1131 - DNA, 60 bp, Artificial Sequence
  Description of Artificial Sequence: targeting sequence/synthetic sequence
agctccaccaaccagctgcggagcgtgggcctgaacctggagggcaacggcgtggccacc

SEQ ID NO: 1132 - DNA, 60 bp, Artificial Sequence
  Description of Artificial Sequence: targeting sequence/synthetic sequence
ccaggacctggcaatgcccagacatctgtgtccccctcaaaagtcatcctgccccgggga

SEQ ID NO: 1133 - DNA, 60 bp, Artificial Sequence
  Description of Artificial Sequence: targeting sequence/synthetic sequence
gtgatcgcccgggccgacaacgacgtgaacagctccctggcccacggccacaccgccgtg

SEQ ID NO: 1134 - DNA, 60 bp, Artificial Sequence
  Description of Artificial Sequence: targeting sequence/synthetic sequence
ggctacagcgtggacaacgagaaccccctgagcggcaaggccggcggagtggtcaaggtg

SEQ ID NO: 1135 - DNA, 60 bp, Artificial Sequence
  Description of Artificial Sequence: targeting sequence/synthetic sequence
caagctaaacaaatccaagagcagctgaaagtgccacaaaatggtaaaagctacagtctt

SEQ ID NO: 1136 - DNA, 60 bp, Artificial Sequence
  Description of Artificial Sequence: targeting sequence/synthetic sequence
gctggcaaccacacttctggggcaggcctggtgcaaatcaacaaaagtaatgggaaggag

SEQ ID NO: 1137 - DNA, 60 bp, Artificial Sequence
  Description of Artificial Sequence: targeting sequence/synthetic sequence
aataacatgatccagaccaagccaacaggaacccagcaatcgaccaatacagctgtgacc

SEQ ID NO: 1138 - DNA, 60 bp, Artificial Sequence
  Description of Artificial Sequence: targeting sequence/synthetic sequence
aacgccctgaacggcaacggcgaccccaacaatatggacaaggccgtgaagctgtaccgg

SEQ ID NO: 1139 - DNA, 60 bp, Artificial Sequence
  Description of Artificial Sequence: targeting sequence/synthetic sequence
gagctggccaaacacgcggtgtcggagggcaccaaggcggtcagcaagtacaccagctcc

SEQ ID NO: 1140 - DNA, 60 bp, Artificial Sequence
  Description of Artificial Sequence: targeting sequence/synthetic sequence
aaacagatcaacgattacgtggagaagggtactcaagggaaaattgtggatttggtcaag

SEQ ID NO: 1141 - DNA, 60 bp, Artificial Sequence
  Description of Artificial Sequence: targeting sequence/synthetic sequence
agctccataaatgtcaccttgggggcccacaatatcaaagaacaggagccgacccagcag

SEQ ID NO: 1142 - DNA, 60 bp, Artificial Sequence
  Description of Artificial Sequence: targeting sequence/synthetic sequence
atcaatggctctcagcatccatcatcatcgtcgtctgtcaatgatgtgtcttcaatgtca

SEQ ID NO: 1143 - DNA, 60 bp, Artificial Sequence
  Description of Artificial Sequence: targeting sequence/synthetic sequence
aagctgagctccaccaaccagctgcggagcgtgggcctgaacctggagggcaacggcgtg

SEQ ID NO: 1144 - DNA, 60 bp, Artificial Sequence
  Description of Artificial Sequence: targeting sequence/synthetic sequence
ctcaaccaggcccaggaacattttggcaaagacaaatcaaaagaattccaactattcagc

SEQ ID NO: 1145 - DNA, 60 bp, Artificial Sequence
  Description of Artificial Sequence: targeting sequence/synthetic sequence
agtgaggagaacctggccaagctgatccagcatgccaatgtacaggcgcacagcagcctc

SEQ ID NO: 1146 - DNA, 60 bp, Artificial Sequence
  Description of Artificial Sequence: targeting sequence/synthetic sequence
ccagtctcagagctgatcaccaaggctgtggctgcttctaaggagcgcaatggcctttct

SEQ ID NO: 1147 - DNA, 60 bp, Artificial Sequence
  Description of Artificial Sequence: targeting sequence/synthetic sequence
atgagctcacgaggcactacaggaaacacacaggtgcaaagcccttcaaatgcaaccact

SEQ ID NO: 1148 - DNA, 60 bp, Artificial Sequence
  Description of Artificial Sequence: targeting sequence/synthetic sequence
gagccattgaagcagagagtggaagcctccatctcaaaggcaaactcatttttgggggag

SEQ ID NO: 1149 - DNA, 60 bp, Artificial Sequence
  Description of Artificial Sequence: targeting sequence/synthetic sequence
ctggatgcactgcagcgtggtaagggcctgagccatggggtcccggaacacccagccctg

SEQ ID NO: 1150 - DNA, 60 bp, Artificial Sequence
  Description of Artificial Sequence: targeting sequence/synthetic sequence
gcgatgagctcacgaggcactacaggaaacacacaggtgcaaagcccttcaaatgcaacc

SEQ ID NO: 1151 - DNA, 60 bp, Artificial Sequence
  Description of Artificial Sequence: targeting sequence/synthetic sequence
cctggtgctaaaggtgccaatggtgctcctggtattgctggtgctcctggcttccctggt

SEQ ID NO: 1152 - DNA, 60 bp, Artificial Sequence
  Description of Artificial Sequence: targeting sequence/synthetic sequence
tctacacagtttgatgctgctcatcccactaatgtccagcgtttggctgaaccatcacag

SEQ ID NO: 1153 - DNA, 60 bp, Artificial Sequence
  Description of Artificial Sequence: targeting sequence/synthetic sequence
aacgccctgcagctgagccagcccaagccccagaagcagctgaccgcccagagcaccccc

SEQ ID NO: 1154 - DNA, 60 bp, Artificial Sequence
  Description of Artificial Sequence: targeting sequence/synthetic sequence
actaatgtccagcgtttggctgaaccatcacagatgctgaaacatgcagttgtaaacttg

SEQ ID NO: 1155 - DNA, 60 bp, Artificial Sequence
  Description of Artificial Sequence: targeting sequence/synthetic sequence
gacacgcaggagaagctcaaccaccagcttgagggcctgaccttccagatgaagaagaac

SEQ ID NO: 1156 - DNA, 60 bp, Artificial Sequence
  Description of Artificial Sequence: targeting sequence/synthetic sequence
cagctgagcaacaatgccaaggaggccgtggaacatctccagaaatctgaactcacccag

SEQ ID NO: 1157 - DNA, 60 bp, Artificial Sequence
  Description of Artificial Sequence: targeting sequence/synthetic sequence
atgccaaaccactctgaaaccatcagtcacactgtgaacgtgcccctgcagacgaccctg

SEQ ID NO: 1158 - DNA, 60 bp, Artificial Sequence
  Description of Artificial Sequence: targeting sequence/synthetic sequence
ggccagagacaggggactcaggcggaatccaacctgagtagtaaattccagttttccagc

SEQ ID NO: 1159 - DNA, 60 bp, Artificial Sequence
  Description of Artificial Sequence: targeting sequence/synthetic sequence
gaggtcaacccagcagcgcatctcacaggggccaactccagcttgaccggcagcgggggg

SEQ ID NO: 1160 - DNA, 60 bp, Artificial Sequence
  Description of Artificial Sequence: targeting sequence/synthetic sequence
accgtgatcagcaacgccctgcagctgagccagcccaagccccagaagcagctgaccgcc

SEQ ID NO: 1161 - DNA, 60 bp, Artificial Sequence
  Description of Artificial Sequence: targeting sequence/synthetic sequence
ctgaacgaggtgctggtggtccccaacatcaaggagagccaccataccacaagcaacagc

SEQ ID NO: 1162 - DNA, 60 bp, Artificial Sequence
  Description of Artificial Sequence: targeting sequence/synthetic sequence
gtgcagaacgccctgaacggcaacggcgaccccaacaatatggacaaggccgtgaagctg

SEQ ID NO: 1163 - DNA, 60 bp, Artificial Sequence
  Description of Artificial Sequence: targeting sequence/synthetic sequence
tcctcaggccatgttcatttatcctcagagaataaattccaaaactctgcaatcttaaca

SEQ ID NO: 1164 - DNA, 60 bp, Artificial Sequence
  Description of Artificial Sequence: targeting sequence/synthetic sequence
gtcttctccaatgaccacagcagtgggaccaaggagaccaggctggagctgagggagatg

SEQ ID NO: 1165 - DNA, 60 bp, Artificial Sequence
  Description of Artificial Sequence: targeting sequence/synthetic sequence
aacacacaggtgcaaagcccttcaaatgcaaccactgcgacaggtgtttttccaggtctg

SEQ ID NO: 1166 - DNA, 60 bp, Artificial Sequence
  Description of Artificial Sequence: targeting sequence/synthetic sequence
agcagcagcagcagcagcagcgagagcggcagcagcagcaggagcagcagcaacaacagc

SEQ ID NO: 1167 - DNA, 60 bp, Artificial Sequence
  Description of Artificial Sequence: targeting sequence/synthetic sequence
agcaagagccagatcagctccgccctgaacgtgaacgccaaggtgctggagaacagcctg

SEQ ID NO: 1168 - DNA, 60 bp, Artificial Sequence
  Description of Artificial Sequence: targeting sequence/synthetic sequence
aacgtgattgggattggggagcccagccgcccctcagagaaacggagaacagaagaagct

SEQ ID NO: 1169 - DNA, 60 bp, Artificial Sequence
  Description of Artificial Sequence: targeting sequence/synthetic sequence
atccaagagcagctgaaagtgccacaaaatggtaaaagctacagtcttaaagcatccagc

SEQ ID NO: 1170 - DNA, 60 bp, Artificial Sequence
  Description of Artificial Sequence: targeting sequence/synthetic sequence
cccaagccccagagcaacctgcccgacaccaaggccagcggccccgcccacagcaaggag

SEQ ID NO: 1171 - DNA, 60 bp, Artificial Sequence
  Description of Artificial Sequence: targeting sequence/synthetic sequence
caggtgctgaacgtgggcccccgggtgcccatcggccccaaccccgtgatcaccgagcag

SEQ ID NO: 1172 - DNA, 60 bp, Artificial Sequence
  Description of Artificial Sequence: targeting sequence/synthetic sequence
caggcggaatccaacctgagtagtaaattccagttttccagcaacaaggaacagaacgga

SEQ ID NO: 1173 - DNA, 60 bp, Artificial Sequence
  Description of Artificial Sequence: targeting sequence/synthetic sequence
gaggagaacctggccaagctgatccagcatgccaatgtacaggcgcacagcagcctcatc

SEQ ID NO: 1174 - DNA, 60 bp, Artificial Sequence
  Description of Artificial Sequence: targeting sequence/synthetic sequence
ggcaatgcccagacatctgtgtccccctcaaaagtcatcctgccccggggaggctccgtg

SEQ ID NO: 1175 - DNA, 60 bp, Artificial Sequence
  Description of Artificial Sequence: targeting sequence/synthetic sequence
gccaagaaacagatcaacgattacgtggagaagggtactcaagggaaaattgtggatttg

SEQ ID NO: 1176 - DNA, 60 bp, Artificial Sequence
  Description of Artificial Sequence: targeting sequence/synthetic sequence
aaccaggcccaggaacattttggcaaagacaaatcaaaagaattccaactattcagctct

SEQ ID NO: 1177 - DNA, 60 bp, Artificial Sequence
  Description of Artificial Sequence: targeting sequence/synthetic sequence
gtgtcagagctgatcgtgcaggctgcttcctcctctaaggagcgtggtggtgtgtcgttg

SEQ ID NO: 1178 - DNA, 60 bp, Artificial Sequence
  Description of Artificial Sequence: targeting sequence/synthetic sequence
gaagtatctacagatttgattcaggcaaatcctaaacaaggcgcgttagcgaaaaagtca

SEQ ID NO: 1179 - DNA, 60 bp, Artificial Sequence
  Description of Artificial Sequence: targeting sequence/synthetic sequence
ggcgccggcatggccggcggaatcaccggcagcatgagcctggccagcggccggagcctg

SEQ ID NO: 1180 - DNA, 60 bp, Artificial Sequence
  Description of Artificial Sequence: targeting sequence/synthetic sequence
gccctggccctgagcctgcccaagccccagagcaacctgcccgacaccaaggccagcggc

SEQ ID NO: 1181 - DNA, 60 bp, Artificial Sequence
  Description of Artificial Sequence: targeting sequence/synthetic sequence
ctcttgcagctgggccaggagactgacaagcttaaaaccagaaatcgagaatccatttct

SEQ ID NO: 1182 - DNA, 60 bp, Artificial Sequence
  Description of Artificial Sequence: targeting sequence/synthetic sequence
ctcattgtggccagacaagggatgggggacatggctgtgtccaactccattgggagcaac

SEQ ID NO: 1183 - DNA, 60 bp, Artificial Sequence
  Description of Artificial Sequence: targeting sequence/synthetic sequence
agcagcagcgagagcggcagcagcagcaggagcagcagcaacaacagcagcatctctcgt

SEQ ID NO: 1184 - DNA, 60 bp, Artificial Sequence
  Description of Artificial Sequence: targeting sequence/synthetic sequence
accctacgccctggcgaggtgacggcgctggtgggacccaatgggtctgggaagagcaca

SEQ ID NO: 1185 - DNA, 60 bp, Artificial Sequence
  Description of Artificial Sequence: targeting sequence/synthetic sequence
aagcacctagcagagctgaatcaccagaagcagctggagtccaataagatcccagagctg

SEQ ID NO: 1186 - DNA, 60 bp, Artificial Sequence
  Description of Artificial Sequence: targeting sequence/synthetic sequence
gtgcagaacgccctgaacggcaacggcgacagcaacaatatggaccgggccgtgaagctg

SEQ ID NO: 1187 - DNA, 60 bp, Artificial Sequence
  Description of Artificial Sequence: targeting sequence/synthetic sequence
ttaacaggagataccactgttaccagaggagatgctttccttaacaaaaatagtatctta

SEQ ID NO: 1188 - DNA, 60 bp, Artificial Sequence
  Description of Artificial Sequence: targeting sequence/synthetic sequence
gccttcacacaggagaccatcgaccgcttggcgggtaaacccacccatgtcaatgtgtct

SEQ ID NO: 1189 - DNA, 60 bp, Artificial Sequence
  Description of Artificial Sequence: targeting sequence/synthetic sequence
acacaggtgcaaagcccttcaaatgcaaccactgcgacaggtgtttttccaggtctgacc

SEQ ID NO: 1190 - DNA, 60 bp, Artificial Sequence
  Description of Artificial Sequence: targeting sequence/synthetic sequence
gtatctacagatttgattcaggcaaatcctaaacaaggcgcgttagcgaaaaagtcatct

SEQ ID NO: 1191 - DNA, 60 bp, Artificial Sequence
  Description of Artificial Sequence: targeting sequence/synthetic sequence
gttgctacgatttctgcaaacggagacaaagaaattggcaatatcatctctgatgcaatg

SEQ ID NO: 1192 - DNA, 60 bp, Artificial Sequence
  Description of Artificial Sequence: targeting sequence/synthetic sequence
aatgtcaccttgggggcccacaatatcaaagaacaggagccgacccagcagtttatccct

SEQ ID NO: 1193 - DNA, 60 bp, Artificial Sequence
  Description of Artificial Sequence: targeting sequence/synthetic sequence
ctggcagtcatgcattcccagagcaccaatcagcttgatgtggggaacaatccccgtgtg

SEQ ID NO: 1194 - DNA, 60 bp, Artificial Sequence
  Description of Artificial Sequence: targeting sequence/synthetic sequence
gtgaagcgatcatctcagtccacattggaacgatctgaacagcagatcagggctgcttct

SEQ ID NO: 1195 - DNA, 60 bp, Artificial Sequence
  Description of Artificial Sequence: targeting sequence/synthetic sequence
cgggccgacaacgacgtgaacagctccctggcccacggccacaccgccgtggacctgacc

SEQ ID NO: 1196 - DNA, 60 bp, Artificial Sequence
  Description of Artificial Sequence: targeting sequence/synthetic sequence
aggcccccaggaagggccctggacactgcagcaggcagcccagtccagactgcccatggc

SEQ ID NO: 1197 - DNA, 60 bp, Artificial Sequence
  Description of Artificial Sequence: targeting sequence/synthetic sequence
gttaatggacaaatagaaagcctcattagtcctgatggttctcgtaaaaaccccgctaga

SEQ ID NO: 1198 - DNA, 60 bp, Artificial Sequence
  Description of Artificial Sequence: targeting sequence/synthetic sequence
gccagcgaaagggggctccacatgcagaagctggggtctgggtcagtgcaggctgcgctg

SEQ ID NO: 1199 - DNA, 60 bp, Artificial Sequence
  Description of Artificial Sequence: targeting sequence/synthetic sequence
aatggacaaatagaaagcctcattagtcctgatggttctcgtaaaaaccccgctagaaac

SEQ ID NO: 1200 - DNA, 60 bp, Artificial Sequence
  Description of Artificial Sequence: targeting sequence/synthetic sequence
gtgttgggtgcccctgacttgggccagagaccccaggggaccaggccaggattggccaaa

SEQ ID NO: 1201 - DNA, 60 bp, Artificial Sequence
  Description of Artificial Sequence: targeting sequence/synthetic sequence
aacatagatgtccgaaacagcacgcaacatttaggaccagtacatcgtgaaaaagccgag

SEQ ID NO: 1202 - DNA, 60 bp, Artificial Sequence
  Description of Artificial Sequence: targeting sequence/synthetic sequence
caccgcggggcccccgtcaacatctcctcgtccgacctcacaggccgacaagatacctct

SEQ ID NO: 1203 - DNA, 60 bp, Artificial Sequence
  Description of Artificial Sequence: targeting sequence/synthetic sequence
gtgctgaacgtgggcccccgggtgcccatcggccccaaccccgtgatcaccgagcagctg

SEQ ID NO: 1204 - DNA, 60 bp, Artificial Sequence
  Description of Artificial Sequence: targeting sequence/synthetic sequence
cagggcatatccagctcctctaccagcacgatgccaaactccagccagtcctctcactcc

SEQ ID NO: 1205 - DNA, 60 bp, Artificial Sequence
  Description of Artificial Sequence: targeting sequence/synthetic sequence
gtggagaagaccaagcagaccctggccagcgtgagctccggccccaagcacacccagagc

SEQ ID NO: 1206 - DNA, 60 bp, Artificial Sequence
  Description of Artificial Sequence: targeting sequence/synthetic sequence
aacgacgtgaacagctccctggcccacggccacaccgccgtggacctgaccctgagcaag

SEQ ID NO: 1207 - DNA, 60 bp, Artificial Sequence
  Description of Artificial Sequence: targeting sequence/synthetic sequence
agcgtcctcactgccctgcaggactccagcaaacgaaagcagctggtcagcgatggcctg

SEQ ID NO: 1208 - DNA, 60 bp, Artificial Sequence
  Description of Artificial Sequence: targeting sequence/synthetic sequence
gtggacaacgagaaccccctgagcggcaaggccggcggagtggtcaaggtgacctacccc

SEQ ID NO: 1209 - DNA, 60 bp, Artificial Sequence
  Description of Artificial Sequence: targeting sequence/synthetic sequence
acagttgcagccaacgtgattgggattggggagcccagccgcccctcagagaaacggaga

SEQ ID NO: 1210 - DNA, 60 bp, Artificial Sequence
  Description of Artificial Sequence: targeting sequence/synthetic sequence
ggcctggcagtcatgcattcccagagcaccaatcagcttgatgtggggaacaatccccgt

SEQ ID NO: 1211 - DNA, 60 bp, Artificial Sequence
  Description of Artificial Sequence: targeting sequence/synthetic sequence
aaacctgggagctctggacctggaagtactggaagctggaactctgggagctctggaact

SEQ ID NO: 1212 - DNA, 60 bp, Artificial Sequence
  Description of Artificial Sequence: targeting sequence/synthetic sequence
acaggaaacacacaggtgcaaagcccttcaaatgcaaccactgcgacaggtgtttttcca

SEQ ID NO: 1213 - DNA, 60 bp, Artificial Sequence
  Description of Artificial Sequence: targeting sequence/synthetic sequence
accttgggggcccacaatatcaaagaacaggagccgacccagcagtttatccctgtgaaa

SEQ ID NO: 1214 - DNA, 60 bp, Artificial Sequence
  Description of Artificial Sequence: targeting sequence/synthetic sequence
cgggtggccgacaccatcatgagcggccccagcaacagccagcaagtgcccgccctgacc

SEQ ID NO: 1215 - DNA, 60 bp, Artificial Sequence
  Description of Artificial Sequence: targeting sequence/synthetic sequence
gcaaacggagacaaagaaattggcaatatcatctctgatgcaatgaaaaaagttggaaga

SEQ ID NO: 1216 - DNA, 60 bp, Artificial Sequence
  Description of Artificial Sequence: targeting sequence/synthetic sequence
atcatggagtttcctaataaatttaatacattggtaggggaaaaaggagctcaaatgagt

SEQ ID NO: 1217 - DNA, 60 bp, Artificial Sequence
  Description of Artificial Sequence: targeting sequence/synthetic sequence
gatggggagacgaaccttaaaatacgtcagggtttgagtcacactgctgacatgcaaaca

SEQ ID NO: 1218 - DNA, 60 bp, Artificial Sequence
  Description of Artificial Sequence: targeting sequence/synthetic sequence
ctacccggggagctggccaaacacgcggtgtcggagggcaccaaggcggtcagcaagtac

SEQ ID NO: 1219 - DNA, 60 bp, Artificial Sequence
  Description of Artificial Sequence: targeting sequence/synthetic sequence
aaagcagtcccagatcgcaatgcaactactttgggattgcctaacaactcgaataattct

SEQ ID NO: 1220 - DNA, 60 bp, Artificial Sequence
  Description of Artificial Sequence: targeting sequence/synthetic sequence
aacctgcaggacatccagggcaagatggaggccgctatcaagaaaatccccaccatcagc

SEQ ID NO: 1221 - DNA, 60 bp, Artificial Sequence
  Description of Artificial Sequence: targeting sequence/synthetic sequence
cagcctggtgctaaaggtgccaatggtgctcctggtattgctggtgctcctggcttccct

SEQ ID NO: 1222 - DNA, 60 bp, Artificial Sequence
  Description of Artificial Sequence: targeting sequence/synthetic sequence
ccagcagcgcatctcacaggggccaactccagcttgaccggcagcggggggccgctgtta

SEQ ID NO: 1223 - DNA, 60 bp, Artificial Sequence
  Description of Artificial Sequence: targeting sequence/synthetic sequence
actgtgcagtctctaacccagggagatggcgtggccaaactcagcatcaacacacacccc

SEQ ID NO: 1224 - DNA, 60 bp, Artificial Sequence
  Description of Artificial Sequence: targeting sequence/synthetic sequence
cagctgcagcccagcctgcagaccggcagcgaggaacggaagagcctgtacaacaccgtg

SEQ ID NO: 1225 - DNA, 60 bp, Artificial Sequence
  Description of Artificial Sequence: targeting sequence/synthetic sequence
aagaaaatcattggccagctgcagcccagcctgcagaccggcagcgaggaactgaagagc

SEQ ID NO: 1226 - DNA, 60 bp, Artificial Sequence
  Description of Artificial Sequence: targeting sequence/synthetic sequence
atttctgcaaacggagacaaagaaattggcaatatcatctctgatgcaatgaaaaaagtt

SEQ ID NO: 1227 - DNA, 60 bp, Artificial Sequence
  Description of Artificial Sequence: targeting sequence/synthetic sequence
agcacgatgccaaactccagccagtcctctcactccagctctgggacactgagctcctta

SEQ ID NO: 1228 - DNA, 60 bp, Artificial Sequence
  Description of Artificial Sequence: targeting sequence/synthetic sequence
tttcctaataaatttaatacattggtaggggaaaaaggagctcaaatgagtggagggcag

SEQ ID NO: 1229 - DNA, 60 bp, Artificial Sequence
  Description of Artificial Sequence: targeting sequence/synthetic sequence
gaggtgaatgtaattcctccacacactccagttaggactgttatgaacactatccaacaa

SEQ ID NO: 1230 - DNA, 60 bp, Artificial Sequence
  Description of Artificial Sequence: targeting sequence/synthetic sequence
gccctgcagctgagccagcccaagccccagaagcagctgaccgcccagagcacccccagc

SEQ ID NO: 1231 - DNA, 60 bp, Artificial Sequence
  Description of Artificial Sequence: targeting sequence/synthetic sequence
tacagcaagagccagatcagctccgccctgaacgtgaacgccaaggtgctggagaacagc

SEQ ID NO: 1232 - DNA, 60 bp, Artificial Sequence
  Description of Artificial Sequence: targeting sequence/synthetic sequence
ctcacaattggagaaggacagcaacaccacctggggggagccaaacaggctggagacgtt

SEQ ID NO: 1233 - DNA, 60 bp, Artificial Sequence
  Description of Artificial Sequence: targeting sequence/synthetic sequence
atgttaacaggagataccactgttaccagaggagatgctttccttaacaaaaatagtatc

SEQ ID NO: 1234 - DNA, 60 bp, Artificial Sequence
  Description of Artificial Sequence: targeting sequence/synthetic sequence
gttcaagaagaaagaagtgctggagcaacagccaacctgcctctgagatctggaagaaat

SEQ ID NO: 1235 - DNA, 60 bp, Artificial Sequence
  Description of Artificial Sequence: targeting sequence/synthetic sequence
gagctggtacttgaaggccaggtagcccagagctcagtcatcctgggtggagctgcccat

SEQ ID NO: 1236 - DNA, 60 bp, Artificial Sequence
  Description of Artificial Sequence: targeting sequence/synthetic sequence
ttcgcccccgccaacacccacaacaataacatcgagggccaggccatcgtgtaccagaac

SEQ ID NO: 1237 - DNA, 60 bp, Artificial Sequence
  Description of Artificial Sequence: targeting sequence/synthetic sequence
gcagagccattgaagcagagagtggaagcctccatctcaaaggcaaactcatttttgggg

SEQ ID NO: 1238 - DNA, 60 bp, Artificial Sequence
  Description of Artificial Sequence: targeting sequence/synthetic sequence
agctcctctaccagcacgatgccaaactccagccagtcctctcactccagctctgggaca

SEQ ID NO: 1239 - DNA, 60 bp, Artificial Sequence
  Description of Artificial Sequence: targeting sequence/synthetic sequence
gttgaaacagctaatctggatggggagacgaaccttaaaatacgtcagggtttgagtcac

SEQ ID NO: 1240 - DNA, 60 bp, Artificial Sequence
  Description of Artificial Sequence: targeting sequence/synthetic sequence
aaccactctgaaaccatcagtcacactgtgaacgtgcccctgcagacgaccctggggacc

SEQ ID NO: 1241 - DNA, 60 bp, Artificial Sequence
  Description of Artificial Sequence: targeting sequence/synthetic sequence
gcccgggagatcaagcagaatgcccggactctcatgaacttgcacaacaacgaggcaggc

SEQ ID NO: 1242 - DNA, 60 bp, Artificial Sequence
  Description of Artificial Sequence: targeting sequence/synthetic sequence
agactcacaattggagaaggacagcaacaccacctggggggagccaaacaggctggagac

SEQ ID NO: 1243 - DNA, 60 bp, Artificial Sequence
  Description of Artificial Sequence: targeting sequence/synthetic sequence
acaggagataccactgttaccagaggagatgctttccttaacaaaaatagtatcttatca

SEQ ID NO: 1244 - DNA, 60 bp, Artificial Sequence
  Description of Artificial Sequence: targeting sequence/synthetic sequence
ctccagaacagatttgagagtagtgaggaacaagccagagctgtgcagatgagtacaaaa

SEQ ID NO: 1245 - DNA, 60 bp, Artificial Sequence
  Description of Artificial Sequence: targeting sequence/synthetic sequence
gctctgcgcgagatccgccgttatcagaagtccactgaactgcttattcgtaaactacct

SEQ ID NO: 1246 - DNA, 60 bp, Artificial Sequence
  Description of Artificial Sequence: targeting sequence/synthetic sequence
ttggaggagagaaccaagaatggagttatacgggggcagccctctcctttaggtgcagca

SEQ ID NO: 1247 - DNA, 60 bp, Artificial Sequence
  Description of Artificial Sequence: targeting sequence/synthetic sequence
atggtgtacagcaagagccagatcagctccgccctgaacgtgaacgccaaggtgctggag

SEQ ID NO: 1248 - DNA, 60 bp, Artificial Sequence
  Description of Artificial Sequence: targeting sequence/synthetic sequence
agccctctgagcgggaaggtgaggagtgaggggaccaattccacgctgaccctgagccct

SEQ ID NO: 1249 - DNA, 60 bp, Artificial Sequence
  Description of Artificial Sequence: targeting sequence/synthetic sequence
gaggacatcgccgcccggctcaacattcccgtcagccaggttaacccccgggatgccaag

SEQ ID NO: 1250 - DNA, 60 bp, Artificial Sequence
  Description of Artificial Sequence: targeting sequence/synthetic sequence
agggactcctactcacagatgcagtctcaagctggtggaaacaatactggttcaactcca

SEQ ID NO: 1251 - DNA, 60 bp, Artificial Sequence
  Description of Artificial Sequence: targeting sequence/synthetic sequence
gacaccaacctgcaggacatccagggcaagatggaggccgctatcaagaaaatccccacc

SEQ ID NO: 1252 - DNA, 60 bp, Artificial Sequence
  Description of Artificial Sequence: targeting sequence/synthetic sequence
tcagagctcatcaccaaggctgtggccgcctctaaagagcgtagcggagtttctctggct

SEQ ID NO: 1253 - DNA, 60 bp, Artificial Sequence
  Description of Artificial Sequence: targeting sequence/synthetic sequence
acagatgtaggggagaagggaagccagctggctgcgggacagaaacaacgtctggccatt

SEQ ID NO: 1254 - DNA, 60 bp, Artificial Sequence
  Description of Artificial Sequence: targeting sequence/synthetic sequence
gcccccgccaacacccagaacaataacatcgagggccaggccatcgtgtaccagagcaag

SEQ ID NO: 1255 - DNA, 60 bp, Artificial Sequence
  Description of Artificial Sequence: targeting sequence/synthetic sequence
ctgaacatgcacatgaatgtccagaatgggaagtgggattcagatccatcagggaccaaa

SEQ ID NO: 1256 - DNA, 60 bp, Artificial Sequence
  Description of Artificial Sequence: targeting sequence/synthetic sequence
gatgccagcgaaagggggctccacatgcagaagctggggtctgggtcagtgcaggctgcg

SEQ ID NO: 1257 - DNA, 60 bp, Artificial Sequence
  Description of Artificial Sequence: targeting sequence/synthetic sequence
aatggtaccgtgacacagggggaccaaagagtctccatgccctatgcctccaaagggctg

SEQ ID NO: 1258 - DNA, 60 bp, Artificial Sequence
  Description of Artificial Sequence: targeting sequence/synthetic sequence
attgagatcatcgcgccccataaggtggtggagcggacacagaacgtcactgagaaggtc

SEQ ID NO: 1259 - DNA, 60 bp, Artificial Sequence
  Description of Artificial Sequence: targeting sequence/synthetic sequence
aacacggtcgtcggtgaacggggcactaccctgtctgggggccagaagcagcgcctggcc

SEQ ID NO: 1260 - DNA, 60 bp, Artificial Sequence
  Description of Artificial Sequence: targeting sequence/synthetic sequence
ggttcaactacgcgtgtaaattctactgcaaatgcagagacacaagcaacctcagccttc

SEQ ID NO: 1261 - DNA, 60 bp, Artificial Sequence
  Description of Artificial Sequence: targeting sequence/synthetic sequence
gatatattagcacaggttgccactaatactgagactagtaaaaatgtaggaaatgctatt

SEQ ID NO: 1262 - DNA, 60 bp, Artificial Sequence
  Description of Artificial Sequence: targeting sequence/synthetic sequence
gccctgaaccggagagcccacgccgtgggcgcccaggacgtggtccagcacggcaccgag

SEQ ID NO: 1263 - DNA, 60 bp, Artificial Sequence
  Description of Artificial Sequence: targeting sequence/synthetic sequence
gtgtccgagctcattactaaagctgttgccgcctccaaggagcgcagcggcgtatctttg

SEQ ID NO: 1264 - DNA, 60 bp, Artificial Sequence
  Description of Artificial Sequence: targeting sequence/synthetic sequence
cagcccgccctgcagaccggcaccaaggagctgatcagcctgcacaacaccgtggccacc

SEQ ID NO: 1265 - DNA, 60 bp, Artificial Sequence
  Description of Artificial Sequence: targeting sequence/synthetic sequence
gacagaagggcgcccactcggaaccagccacaggcaccaggcgtggaggccagtggggcc

SEQ ID NO: 1266 - DNA, 60 bp, Artificial Sequence
  Description of Artificial Sequence: targeting sequence/synthetic sequence
gcagtttcaaaagcagtcccagatcgcaatgcaactactttgggattgcctaacaactcg

SEQ ID NO: 1267 - DNA, 60 bp, Artificial Sequence
  Description of Artificial Sequence: targeting sequence/synthetic sequence
catgtcagggactcctactcacagatgcagtctcaagctggtggaaacaatactggttca

SEQ ID NO: 1268 - DNA, 60 bp, Artificial Sequence
  Description of Artificial Sequence: targeting sequence/synthetic sequence
gtggaggtgcataatgccaagacaaagccgcgggaggagcagttcaacagcacgttccgt

SEQ ID NO: 1269 - DNA, 60 bp, Artificial Sequence
  Description of Artificial Sequence: targeting sequence/synthetic sequence
ctgcagcccgccctgcagaccggcaccaaggagctgatcagcctgcacaacaccgtggcc

SEQ ID NO: 1270 - DNA, 60 bp, Artificial Sequence
  Description of Artificial Sequence: targeting sequence/synthetic sequence
gggcttcagggactgccaggcccgaaaggccagcaaggtgttacaggattggtgggtata

SEQ ID NO: 1271 - DNA, 60 bp, Artificial Sequence
  Description of Artificial Sequence: targeting sequence/synthetic sequence
cgggcccacgccgtgggcgcccaggacgtggtccagcacggcaccgagcagaacaatccc

SEQ ID NO: 1272 - DNA, 60 bp, Artificial Sequence
  Description of Artificial Sequence: targeting sequence/synthetic sequence
gccgctggctacagcgtggacaacgagaaccccctgagcggcaaggccggcggagtggtc

SEQ ID NO: 1273 - DNA, 60 bp, Artificial Sequence
  Description of Artificial Sequence: targeting sequence/synthetic sequence
cctagaggctccagcagcagacagagcagcagtagcgctatgtcttcctcttctgcctcc

SEQ ID NO: 1274 - DNA, 60 bp, Artificial Sequence
  Description of Artificial Sequence: targeting sequence/synthetic sequence
caggatatcaccgatgccagcgaaagggggctccacatgcagaagctggggtctgggtca

SEQ ID NO: 1275 - DNA, 60 bp, Artificial Sequence
  Description of Artificial Sequence: targeting sequence/synthetic sequence
aacgttcaagaagaaagaagtgctggagcaacagccaacctgcctctgagatctggaaga

SEQ ID NO: 1276 - DNA, 60 bp, Artificial Sequence
  Description of Artificial Sequence: targeting sequence/synthetic sequence
gacctgaacatgacccgctcccactctggaggcgagctggagagcttggctcgtggaaga

SEQ ID NO: 1277 - DNA, 60 bp, Artificial Sequence
  Description of Artificial Sequence: targeting sequence/synthetic sequence
gataaagctggaactcgagaaaaccagccagctgtggtgcatctacagggccaagggtca

SEQ ID NO: 1278 - DNA, 60 bp, Artificial Sequence
  Description of Artificial Sequence: targeting sequence/synthetic sequence
ttcaatcagtcctacagcaagtttgacacaaaatcgcacaacgatgacgcactgctcaag

SEQ ID NO: 1279 - DNA, 60 bp, Artificial Sequence
  Description of Artificial Sequence: targeting sequence/synthetic sequence
ggccgggtggccgacaccatcgcccggggccccagcaacagcgagcagatccccgccctg

SEQ ID NO: 1280 - DNA, 60 bp, Artificial Sequence
  Description of Artificial Sequence: targeting sequence/synthetic sequence
aatggcttacctgggaacccaggtgtgcagggccagaagggagagcctggagttggtcta

SEQ ID NO: 1281 - DNA, 60 bp, Artificial Sequence
  Description of Artificial Sequence: targeting sequence/synthetic sequence
cagggaccttctggtgctgctgataaagctggaactcgagaaaaccagccagctgtggtg

SEQ ID NO: 1282 - DNA, 60 bp, Artificial Sequence
  Description of Artificial Sequence: targeting sequence/synthetic sequence
tcctacagcaagtttgacacaaaatcgcacaacgatgacgcactgctcaagaactacggg

SEQ ID NO: 1283 - DNA, 60 bp, Artificial Sequence
  Description of Artificial Sequence: targeting sequence/synthetic sequence
ggcctgaccttcctggccaagagcaccgagctgaaccagcccgacaagaaaggctacacc

SEQ ID NO: 1284 - DNA, 60 bp, Artificial Sequence
  Description of Artificial Sequence: targeting sequence/synthetic sequence
gttcagcttaagaatgaacatacatccaaaatcacaactggaggtgatgttattaataat

SEQ ID NO: 1285 - DNA, 60 bp, Artificial Sequence
  Description of Artificial Sequence: targeting sequence/synthetic sequence
cagaatggcgaagctgtgaaaacccacaccaacatctccgagagccaccccaatgccact

SEQ ID NO: 1286 - DNA, 60 bp, Artificial Sequence
  Description of Artificial Sequence: targeting sequence/synthetic sequence
cccagagatgctggttcccagaggccccgaaaaaaggaagacaatgtcttggttgagagc

SEQ ID NO: 1287 - DNA, 60 bp, Artificial Sequence
  Description of Artificial Sequence: targeting sequence/synthetic sequence
ccagctgactcagaacacaacaaacttaaagccagtcaggcaagggatttgttatccaaa

SEQ ID NO: 1288 - DNA, 60 bp, Artificial Sequence
  Description of Artificial Sequence: targeting sequence/synthetic sequence
cagcgtcaacagatcaaagcagcatatctccaggaaacaggaaagcccctggatgaaaca

SEQ ID NO: 1289 - DNA, 60 bp, Artificial Sequence
  Description of Artificial Sequence: targeting sequence/synthetic sequence
aaggccatcaacaagcaggcctacgaggaaatcagcaaggagcacctggccgtgtacaag

SEQ ID NO: 1290 - DNA, 60 bp, Artificial Sequence
  Description of Artificial Sequence: targeting sequence/synthetic sequence
cagggcacacaggatatcaccgatgccagcgaaagggggctccacatgcagaagctgggg

SEQ ID NO: 1291 - DNA, 60 bp, Artificial Sequence
  Description of Artificial Sequence: targeting sequence/synthetic sequence
ctggccaagagcaccgagctgaaccagcccgacaagaaaggctacacccccatccacgtg

SEQ ID NO: 1292 - DNA, 60 bp, Artificial Sequence
  Description of Artificial Sequence: targeting sequence/synthetic sequence
ttcttgggccacaacggggcgggcaagaccaccaccatgtccatcctgaccggcctgttc

SEQ ID NO: 1293 - DNA, 60 bp, Artificial Sequence
  Description of Artificial Sequence: targeting sequence/synthetic sequence
gggagtactgccctctccagatcagcagttcaggagagcacaggaggcaaaacacagatt

SEQ ID NO: 1294 - DNA, 60 bp, Artificial Sequence
  Description of Artificial Sequence: targeting sequence/synthetic sequence
gcccaggccaacgtgctgcggggcgccggcggagccgacgtgctggccggcggagagggc

SEQ ID NO: 1295 - DNA, 60 bp, Artificial Sequence
  Description of Artificial Sequence: targeting sequence/synthetic sequence
ccagacctgaagaatgtcaagtccaagatcggctccactgagaacctgaagcaccagccg

SEQ ID NO: 1296 - DNA, 60 bp, Artificial Sequence
  Description of Artificial Sequence: targeting sequence/synthetic sequence
aaaaacccaaccaaccacttcccttcctcagaaggagattcctcaaaaccttccctgatg

SEQ ID NO: 1297 - DNA, 60 bp, Artificial Sequence
  Description of Artificial Sequence: targeting sequence/synthetic sequence
gagttggacctgaacatgacccgctcccactctggaggcgagctggagagcttggctcgt

SEQ ID NO: 1298 - DNA, 60 bp, Artificial Sequence
  Description of Artificial Sequence: targeting sequence/synthetic sequence
cagaatgcccttaggcccccaggaagggccctggacactgcagcaggcagcccagtccag

SEQ ID NO: 1299 - DNA, 60 bp, Artificial Sequence
  Description of Artificial Sequence: targeting sequence/synthetic sequence
ggtgtgcagggccagaagggagagcctggagttggtctaccgggactcaaaggtttgcca

SEQ ID NO: 1300 - DNA, 60 bp, Artificial Sequence
  Description of Artificial Sequence: targeting sequence/synthetic sequence
actgtgttgggtgcccctgacttgggccagagaccccaggggaccaggccaggattggcc

SEQ ID NO: 1301 - DNA, 60 bp, Artificial Sequence
  Description of Artificial Sequence: targeting sequence/synthetic sequence
aaagggcttcagggactgccaggcccgaaaggccagcaaggtgttacaggattggtgggt

SEQ ID NO: 1302 - DNA, 60 bp, Artificial Sequence
  Description of Artificial Sequence: targeting sequence/synthetic sequence
ttggacagaagggcgcccactcggaaccagccacaggcaccaggcgtggaggccagtggg

SEQ ID NO: 1303 - DNA, 60 bp, Artificial Sequence
  Description of Artificial Sequence: targeting sequence/synthetic sequence
aacctgaaggagacgtggacagccaacgttggtaaggggcagcccagtgtcctgcaggtg

SEQ ID NO: 1304 - DNA, 60 bp, Artificial Sequence
  Description of Artificial Sequence: targeting sequence/synthetic sequence
ggccctggtgcaggcagcctgcagcccttggccctggaggggtccctgcagaagcgtggc

SEQ ID NO: 1305 - DNA, 60 bp, Artificial Sequence
  Description of Artificial Sequence: targeting sequence/synthetic sequence
agcagcctcatccgtaacctggagcagctgggaggcactgtcaccaaccccgggggctcg

SEQ ID NO: 1306 - DNA, 60 bp, Artificial Sequence
  Description of Artificial Sequence: targeting sequence/synthetic sequence
ggcagcctgtacgacaaccaggccaacgacgccggcaagaaactggccaagaacctgctc

SEQ ID NO: 1307 - DNA, 60 bp, Artificial Sequence
  Description of Artificial Sequence: targeting sequence/synthetic sequence
ctcaagtctgttaatggacaaatagaaagcctcattagtcctgatggttctcgtaaaaac

SEQ ID NO: 1308 - DNA, 60 bp, Artificial Sequence
  Description of Artificial Sequence: targeting sequence/synthetic sequence
gcacagcgtcaacagatcaaagcagcatatctccaggaaacaggaaagcccctggatgaa

SEQ ID NO: 1309 - DNA, 60 bp, Artificial Sequence
  Description of Artificial Sequence: targeting sequence/synthetic sequence
aagcgatcatctcagtccacattggaacgatctgaacagcagatcagggctgcttctagt

SEQ ID NO: 1310 - DNA, 60 bp, Artificial Sequence
  Description of Artificial Sequence: targeting sequence/synthetic sequence
cccgtcaacatctcctcgtccgacctcacaggccgacaagatacctctcgcatgtccacc

SEQ ID NO: 1311 - DNA, 60 bp, Artificial Sequence
  Description of Artificial Sequence: targeting sequence/synthetic sequence
ttcctggccaagagcaccgagctgaaccagcccgacaagaaaggctacacccccatccac

SEQ ID NO: 1312 - DNA, 60 bp, Artificial Sequence
  Description of Artificial Sequence: targeting sequence/synthetic sequence
ggtgctgctgataaagctggaactcgagaaaaccagccagctgtggtgcatctacagggc

SEQ ID NO: 1313 - DNA, 60 bp, Artificial Sequence
  Description of Artificial Sequence: targeting sequence/synthetic sequence
actcaggcggaatccaacctgagtagtaaattccagttttccagcaacaaggaacagaac

SEQ ID NO: 1314 - DNA, 60 bp, Artificial Sequence
  Description of Artificial Sequence: targeting sequence/synthetic sequence
cccgtgcccatgccagacctgaagaatgtcaagtccaagatcggctccactgagaacctg

SEQ ID NO: 1315 - DNA, 60 bp, Artificial Sequence
  Description of Artificial Sequence: targeting sequence/synthetic sequence
actctttatgtgacaggaaagcaaaatgaactctctgacacagcaggaagggaaattaac

SEQ ID NO: 1316 - DNA, 60 bp, Artificial Sequence
  Description of Artificial Sequence: targeting sequence/synthetic sequence
gacatcgccgcccggctcaacattcccgtcagccaggttaacccccgggatgccaaggcc

SEQ ID NO: 1317 - DNA, 60 bp, Artificial Sequence
  Description of Artificial Sequence: targeting sequence/synthetic sequence
gtggatgcccgggagatcaagcagaatgcccggactctcatgaacttgcacaacaacgag

SEQ ID NO: 1318 - DNA, 60 bp, Artificial Sequence
  Description of Artificial Sequence: targeting sequence/synthetic sequence
gcaacaggttccaggattggcgtcttaacacaaaatgcaactaacatgggactttcagtt

SEQ ID NO: 1319 - DNA, 60 bp, Artificial Sequence
  Description of Artificial Sequence: targeting sequence/synthetic sequence
ttggtaggggaaaaaggagctcaaatgagtggagggcagaaacagaggatcgcaattgct

SEQ ID NO: 1320 - DNA, 60 bp, Artificial Sequence
  Description of Artificial Sequence: targeting sequence/synthetic sequence
aaatttagttactcctcaggccatgttcatttatcctcagagaataaattccaaaactct

SEQ ID NO: 1321 - DNA, 60 bp, Artificial Sequence
  Description of Artificial Sequence: targeting sequence/synthetic sequence
agcgccaccggcgagagccagatgctgacccggggccagctgaaggagtacatcggccag

SEQ ID NO: 1322 - DNA, 60 bp, Artificial Sequence
  Description of Artificial Sequence: targeting sequence/synthetic sequence
acgcgtgtaaattctactgcaaatgcagagacacaagcaacctcagccttccagacccag

SEQ ID NO: 1323 - DNA, 60 bp, Artificial Sequence
  Description of Artificial Sequence: targeting sequence/synthetic sequence
aacatctcctcgtccgacctcacaggccgacaagatacctctcgcatgtccacctcacag

SEQ ID NO: 1324 - DNA, 60 bp, Artificial Sequence
  Description of Artificial Sequence: targeting sequence/synthetic sequence
cagatcctgggccagctgcagcccagcctgaagaccggcagcgaggaaatccggagcctg

SEQ ID NO: 1325 - DNA, 60 bp, Artificial Sequence
  Description of Artificial Sequence: targeting sequence/synthetic sequence
caaggagcaacaggttccaggattggcgtcttaacacaaaatgcaactaacatgggactt

SEQ ID NO: 1326 - DNA, 60 bp, Artificial Sequence
  Description of Artificial Sequence: targeting sequence/synthetic sequence
ggcggaggccccggcgccggcagcctgcagcccctggccctggagggcagcctgcagaag

SEQ ID NO: 1327 - DNA, 60 bp, Artificial Sequence
  Description of Artificial Sequence: targeting sequence/synthetic sequence
tccagctcctctaccagcacgatgccaaactccagccagtcctctcactccagctctggg

SEQ ID NO: 1328 - DNA, 60 bp, Artificial Sequence
  Description of Artificial Sequence: targeting sequence/synthetic sequence
ggcaacctgaaggagacgtggacagccaacgttggtaaggggcagcccagtgtcctgcag

SEQ ID NO: 1329 - DNA, 60 bp, Artificial Sequence
  Description of Artificial Sequence: targeting sequence/synthetic sequence
cggcccgtgcagagcgtggccagctcccggagacacaagcggttcgccggcgtggtcctg

SEQ ID NO: 1330 - DNA, 60 bp, Artificial Sequence
  Description of Artificial Sequence: targeting sequence/synthetic sequence
gtcaatggtaccgtgacacagggggaccaaagagtctccatgccctatgcctccaaaggg

SEQ ID NO: 1331 - DNA, 60 bp, Artificial Sequence
  Description of Artificial Sequence: targeting sequence/synthetic sequence
ctctctgacacagcaggaagggaaattaacctggttgatgctcaccttaagagtgagcaa

SEQ ID NO: 1332 - DNA, 60 bp, Artificial Sequence
  Description of Artificial Sequence: targeting sequence/synthetic sequence
atggacttggaggagagaaccaagaatggagttatacgggggcagccctctcctttaggt

SEQ ID NO: 1333 - DNA, 60 bp, Artificial Sequence
  Description of Artificial Sequence: targeting sequence/synthetic sequence
gcggagaaggtgtacaacacccgccatcaggaagtgcttcgggagatccaggatgcagtg

SEQ ID NO: 1334 - DNA, 60 bp, Artificial Sequence
  Description of Artificial Sequence: targeting sequence/synthetic sequence
ggtcgtcccggtgaagctggtctgcctggtgccaagggtctgactggaagccctggcagc

SEQ ID NO: 1335 - DNA, 60 bp, Artificial Sequence
  Description of Artificial Sequence: targeting sequence/synthetic sequence
gctgactcagaacacaacaaacttaaagccagtcaggcaagggatttgttatccaaaatg

SEQ ID NO: 1336 - DNA, 60 bp, Artificial Sequence
  Description of Artificial Sequence: targeting sequence/synthetic sequence
actgtggctctgcgcgagatccgccgctaccaaaagtcgaccgagttgctgattcggaag

SEQ ID NO: 1337 - DNA, 60 bp, Artificial Sequence
  Description of Artificial Sequence: targeting sequence/synthetic sequence
gatgaccacttaaaagacctctcattacacaaaaaccagacagtagtggacgttgcagtt

SEQ ID NO: 1338 - DNA, 60 bp, Artificial Sequence
  Description of Artificial Sequence: targeting sequence/synthetic sequence
gaggagagaaccaagaatggagttatacgggggcagccctctcctttaggtgcagcagtg

SEQ ID NO: 1339 - DNA, 60 bp, Artificial Sequence
  Description of Artificial Sequence: targeting sequence/synthetic sequence
gtcagggactcctactcacagatgcagtctcaagctggtggaaacaatactggttcaact

SEQ ID NO: 1340 - DNA, 60 bp, Artificial Sequence
  Description of Artificial Sequence: targeting sequence/synthetic sequence
ccgggatttaatggcttacctgggaacccaggtgtgcagggccagaagggagagcctgga

SEQ ID NO: 1341 - DNA, 60 bp, Artificial Sequence
  Description of Artificial Sequence: targeting sequence/synthetic sequence
tctcgctcttctagagcgggtttgcagtttcccgtaggccggatccatcgtctgcttcgt

SEQ ID NO: 1342 - DNA, 60 bp, Artificial Sequence
  Description of Artificial Sequence: targeting sequence/synthetic sequence
cagacctacagcaagtttgacacaaactcgcacaaccatgacgcactgctcaagaactac

SEQ ID NO: 1343 - DNA, 60 bp, Artificial Sequence
  Description of Artificial Sequence: targeting sequence/synthetic sequence
cctaaaggagataaaggggctcaaggactccctggcataacgggacagtcggggctccct

SEQ ID NO: 1344 - DNA, 60 bp, Artificial Sequence
  Description of Artificial Sequence: targeting sequence/synthetic sequence
atatccagctcctctaccagcacgatgccaaactccagccagtcctctcactccagctct

SEQ ID NO: 1345 - DNA, 60 bp, Artificial Sequence
  Description of Artificial Sequence: targeting sequence/synthetic sequence
agtgatgatgaccacttaaaagacctctcattacacaaaaaccagacagtagtggacgtt

SEQ ID NO: 1346 - DNA, 60 bp, Artificial Sequence
  Description of Artificial Sequence: targeting sequence/synthetic sequence
ctggtacttgaaggccaggtagcccagagctcagtcatcctgggtggagctgcccatagg

SEQ ID NO: 1347 - DNA, 60 bp, Artificial Sequence
  Description of Artificial Sequence: targeting sequence/synthetic sequence
accgaggtggcccagaacgccctggccctgagcctgcccaagccccagagcaacctgccc

SEQ ID NO: 1348 - DNA, 60 bp, Artificial Sequence
  Description of Artificial Sequence: targeting sequence/synthetic sequence
gctcctctagctcccagagatgctggttcccagaggccccgaaaaaaggaagacaatgtc

SEQ ID NO: 1349 - DNA, 60 bp, Artificial Sequence
  Description of Artificial Sequence: targeting sequence/synthetic sequence
agaggatttgctgggagtactgccctctccagatcagcagttcaggagagcacaggaggc

SEQ ID NO: 1350 - DNA, 60 bp, Artificial Sequence
  Description of Artificial Sequence: targeting sequence/synthetic sequence
tacctccagaacagatttgagagtagtgaggaacaagccagagctgtgcagatgagtaca

SEQ ID NO: 1351 - DNA, 60 bp, Artificial Sequence
  Description of Artificial Sequence: targeting sequence/synthetic sequence
atagacagccctctgagcgggaaggtgaggagtgaggggaccaattccacgctgaccctg

SEQ ID NO: 1352 - DNA, 60 bp, Artificial Sequence
  Description of Artificial Sequence: targeting sequence/synthetic sequence
atagcagcggagaaggtgtacaacacccgccatcaggaagtgcttcgggagatccaggat

SEQ ID NO: 1353 - DNA, 60 bp, Artificial Sequence
  Description of Artificial Sequence: targeting sequence/synthetic sequence
tggaactctgggagctctggacctggaagtactggaaaccgaaaccctgggagctctggg

SEQ ID NO: 1354 - DNA, 60 bp, Artificial Sequence
  Description of Artificial Sequence: targeting sequence/synthetic sequence
ccccaggaggagtttgatggcaaccagttccagaaggctccagccatctctgtcctccat

SEQ ID NO: 1355 - DNA, 60 bp, Artificial Sequence
  Description of Artificial Sequence: targeting sequence/synthetic sequence
gagtttgatgataaacagttccagaaggctcaagccatctctgtcctccatgagatgatc

SEQ ID NO: 1356 - DNA, 60 bp, Artificial Sequence
  Description of Artificial Sequence: targeting sequence/synthetic sequence
ccccatcgctaccgccctggcaccgtggctctgcgcgagatccgtcgctaccagaagtct

SEQ ID NO: 1357 - DNA, 60 bp, Artificial Sequence
  Description of Artificial Sequence: targeting sequence/synthetic sequence
ttcaacagggctgtcaagagtttacagaacgcatcagcaattgagagcattcttaaaaat

SEQ ID NO: 1358 - DNA, 60 bp, Artificial Sequence
  Description of Artificial Sequence: targeting sequence/synthetic sequence
aatgtccagcgtttggctgaaccatcacagatgctgaaacatgcagttgtaaacttgatt

SEQ ID NO: 1359 - DNA, 60 bp, Artificial Sequence
  Description of Artificial Sequence: targeting sequence/synthetic sequence
gccgagaccatgggcctgaacaccgccgacaccgcccggctgaacgccaacatccggtac

SEQ ID NO: 1360 - DNA, 60 bp, Artificial Sequence
  Description of Artificial Sequence: targeting sequence/synthetic sequence
agcctgtacgacaaccaggccaacgacgccggcaagaaactggccaagaacctgctccag

SEQ ID NO: 1361 - DNA, 60 bp, Artificial Sequence
  Description of Artificial Sequence: targeting sequence/synthetic sequence
ccttctggtgctgctgataaagctggaactcgagaaaaccagccagctgtggtgcatcta

SEQ ID NO: 1362 - DNA, 60 bp, Artificial Sequence
  Description of Artificial Sequence: targeting sequence/synthetic sequence
gccaccggcgagagccagatgctgacccggggccagctgaaggagtacatcggccagcaa

SEQ ID NO: 1363 - DNA, 60 bp, Artificial Sequence
  Description of Artificial Sequence: targeting sequence/synthetic sequence
atcatgaactccttcgtcaacgacatctttgagcgtatcgccggagaagcgtcacgcctg

SEQ ID NO: 1364 - DNA, 60 bp, Artificial Sequence
  Description of Artificial Sequence: targeting sequence/synthetic sequence
cagaacaaggccatcaacaagcaggcctacgaggaaatcagcaaggagcacctggccgtg

SEQ ID NO: 1365 - DNA, 60 bp, Artificial Sequence
  Description of Artificial Sequence: targeting sequence/synthetic sequence
acgctgccccctggcaagatcgtggccctcgtgggccagtctggcggaggaaagaccacc

SEQ ID NO: 1366 - DNA, 60 bp, Artificial Sequence
  Description of Artificial Sequence: targeting sequence/synthetic sequence
gtcgccgaagccgccgtcagccaatccagtggactcgcagccaaatttgtcatccactgt

SEQ ID NO: 1367 - DNA, 60 bp, Artificial Sequence
  Description of Artificial Sequence: targeting sequence/synthetic sequence
aaggccatgggcatcatgaactccttcgtcaatgacatcttcgagcgcatcgccagcgag

SEQ ID NO: 1368 - DNA, 60 bp, Artificial Sequence
  Description of Artificial Sequence: targeting sequence/synthetic sequence
gaccacaactacctgtgcaagcggggcgtgaccgaccggggctggggcaacggctgcggc

SEQ ID NO: 1369 - DNA, 60 bp, Artificial Sequence
  Description of Artificial Sequence: targeting sequence/synthetic sequence
gacatttcacacacgcagtcagtctcctccaaacagaaagtcaccggtttggacttcatt

SEQ ID NO: 1370 - DNA, 60 bp, Artificial Sequence
  Description of Artificial Sequence: targeting sequence/synthetic sequence
aacccaggtgtgcagggccagaagggagagcctggagttggtctaccgggactcaaaggt

SEQ ID NO: 1371 - DNA, 60 bp, Artificial Sequence
  Description of Artificial Sequence: targeting sequence/synthetic sequence
gggacctcccagctgggtcagcagctgtcagagcatctgaaagacgcactgcaggctgag

SEQ ID NO: 1372 - DNA, 60 bp, Artificial Sequence
  Description of Artificial Sequence: targeting sequence/synthetic sequence
aaaggtcttcctggcctccagggaattaaaggtgatcaaggcgatcacggcgtcccggga

SEQ ID NO: 1373 - DNA, 60 bp, Artificial Sequence
  Description of Artificial Sequence: targeting sequence/synthetic sequence
cgctcacagagagctgggctacagtttcctgtgggccgcatccacagacacttgaagact

SEQ ID NO: 1374 - DNA, 60 bp, Artificial Sequence
  Description of Artificial Sequence: targeting sequence/synthetic sequence
accatgggcctgaacaccgccgacaccgcccggctgaacgccaacatccggtacgtgaac

SEQ ID NO: 1375 - DNA, 60 bp, Artificial Sequence
  Description of Artificial Sequence: targeting sequence/synthetic sequence
ggcaccggcagcggcgggggcggccctgggggcagtggtggtgttggagggggcagtggc

SEQ ID NO: 1376 - DNA, 60 bp, Artificial Sequence
  Description of Artificial Sequence: targeting sequence/synthetic sequence
ctggaggcattcaacagggctgtcaagagtttacagaacgcatcagcaattgagagcatt

SEQ ID NO: 1377 - DNA, 60 bp, Artificial Sequence
  Description of Artificial Sequence: targeting sequence/synthetic sequence
cagggctaccggcacatgaacctgaccagcaccaacaagtactggaccagctccaacggc

SEQ ID NO: 1378 - DNA, 60 bp, Artificial Sequence
  Description of Artificial Sequence: targeting sequence/synthetic sequence
tttcccgtaggccggatccatcgtctgcttcgtaagggaaactatgcagagcggataggg

SEQ ID NO: 1379 - DNA, 60 bp, Artificial Sequence
  Description of Artificial Sequence: targeting sequence/synthetic sequence
ggaagcattgggatcccaggaatgccagggtccccaggccttaaagggtctcccgggagt

SEQ ID NO: 1380 - DNA, 60 bp, Artificial Sequence
  Description of Artificial Sequence: targeting sequence/synthetic sequence
gaaggtccccgaggctttccgggaatccaaggcaggaaaggagaacctggagaaggtgcc

SEQ ID NO: 1381 - DNA, 60 bp, Artificial Sequence
  Description of Artificial Sequence: targeting sequence/synthetic sequence
cactcaacaactctttatgtgacaggaaagcaaaatgaactctctgacacagcaggaagg

SEQ ID NO: 1382 - DNA, 60 bp, Artificial Sequence
  Description of Artificial Sequence: targeting sequence/synthetic sequence
tcttctagagcgggtttgcagtttcccgtaggccggatccatcgtctgcttcgtaaggga

SEQ ID NO: 1383 - DNA, 60 bp, Artificial Sequence
  Description of Artificial Sequence: targeting sequence/synthetic sequence
ggcagcctgcaaccttctagcatccagatctttgccaacacctccaccctccatggcatc

SEQ ID NO: 1384 - DNA, 60 bp, Artificial Sequence
  Description of Artificial Sequence: targeting sequence/synthetic sequence
tcgctggggcccacgttgaacctgagcagcggggagtcgcgcctgctggcggctcggttc

SEQ ID NO: 1385 - DNA, 60 bp, Artificial Sequence
  Description of Artificial Sequence: targeting sequence/synthetic sequence
tccttcgtcaacgacatctttgagcgtatcgccggagaagcgtcacgcctggcgcattac

SEQ ID NO: 1386 - DNA, 60 bp, Artificial Sequence
  Description of Artificial Sequence: targeting sequence/synthetic sequence
taccggcacatgaacctgaccagcaccaacaagtactggaccagctccaacggcacccag

SEQ ID NO: 1387 - DNA, 60 bp, Artificial Sequence
  Description of Artificial Sequence: targeting sequence/synthetic sequence
agcggcgggggcggccctgggggcagtggtggtgttggagggggcagtggcggctacacc

SEQ ID NO: 1388 - DNA, 60 bp, Artificial Sequence
  Description of Artificial Sequence: targeting sequence/synthetic sequence
agcctgcaaccttctagcatccagatctttgccaacacctccaccctccatggcatccgc

SEQ ID NO: 1389 - DNA, 60 bp, Artificial Sequence
  Description of Artificial Sequence: targeting sequence/synthetic sequence
tcaaatcaacaggaaggaatcattacagtaacagatatgaaaggaaataattcccacatt

SEQ ID NO: 1390 - DNA, 60 bp, Artificial Sequence
  Description of Artificial Sequence: targeting sequence/synthetic sequence
gagaaggtgtacaacacccgccatcaggaagtgcttcgggagatccaggatgcagtggcc

SEQ ID NO: 1391 - DNA, 60 bp, Artificial Sequence
  Description of Artificial Sequence: targeting sequence/synthetic sequence
aagaaacctcatcgctaccgcccgggcaccgtggccttgcgcgaaatccgtcgctaccag

SEQ ID NO: 1392 - DNA, 60 bp, Artificial Sequence
  Description of Artificial Sequence: targeting sequence/synthetic sequence
caggtggtctccttcttgggccacaacggggcgggcaagaccaccaccatgtccatcctg

SEQ ID NO: 1393 - DNA, 60 bp, Artificial Sequence
  Description of Artificial Sequence: targeting sequence/synthetic sequence
cagaaaaacccaaccaaccacttcccttcctcagaaggagattcctcaaaaccttccctg

SEQ ID NO: 1394 - DNA, 60 bp, Artificial Sequence
  Description of Artificial Sequence: targeting sequence/synthetic sequence
gccgtcagccaatccagtggactcgcagccaaatttgtcatccactgtcacatccctcag

SEQ ID NO: 1395 - DNA, 60 bp, Artificial Sequence
  Description of Artificial Sequence: targeting sequence/synthetic sequence
atttcgtccaaggccatgggcatcatgaattcgtttgtgaacgacattttcgagcgcatc

SEQ ID NO: 1396 - DNA, 60 bp, Artificial Sequence
  Description of Artificial Sequence: targeting sequence/synthetic sequence
ggcagactgaacatgcacatgaatgtccagaatgggaagtgggattcagatccatcaggg

SEQ ID NO: 1397 - DNA, 60 bp, Artificial Sequence
  Description of Artificial Sequence: targeting sequence/synthetic sequence
gacacagcaggaagggaaattaacctggttgatgctcaccttaagagtgagcaaacagaa

SEQ ID NO: 1398 - DNA, 60 bp, Artificial Sequence
  Description of Artificial Sequence: targeting sequence/synthetic sequence
tttcctgtgggccgagtgcaccgcctgctccgcaaaggcaactactccgagcgcgtcggg

SEQ ID NO: 1399 - DNA, 60 bp, Artificial Sequence
  Description of Artificial Sequence: targeting sequence/synthetic sequence
cggcaggccggcctggtgaccggcatggccgacggcgtggtcgccagcaaccacgccggc

SEQ ID NO: 1400 - DNA, 60 bp, Artificial Sequence
  Description of Artificial Sequence: targeting sequence/synthetic sequence
actcggtcttctcgtgcaggtttgcagtttcctgtgggccgagtgcaccgcctgctccgc

SEQ ID NO: 1401 - DNA, 60 bp, Artificial Sequence
  Description of Artificial Sequence: targeting sequence/synthetic sequence
atccggcccgtgcagagcgtggccagctcccggagacacaagcggttcgccggcgtggtc

SEQ ID NO: 1402 - DNA, 60 bp, Artificial Sequence
  Description of Artificial Sequence: targeting sequence/synthetic sequence
cccgggacctcccagctgggtcagcagctgtcagagcatctgaaagacgcactgcaggct

SEQ ID NO: 1403 - DNA, 60 bp, Artificial Sequence
  Description of Artificial Sequence: targeting sequence/synthetic sequence
gacaagcggctggtgtgcaagcacagcatggtggaccggggctggggcaacggctgcggc

SEQ ID NO: 1404 - DNA, 60 bp, Artificial Sequence
  Description of Artificial Sequence: targeting sequence/synthetic sequence
tcaagtgactccaacaacctaaaactcaacaacgtgcgcctgccacgggagaacatgtcc

SEQ ID NO: 1405 - DNA, 60 bp, Artificial Sequence
  Description of Artificial Sequence: targeting sequence/synthetic sequence
ccggagctggagaacaacaagaccatgaaccgggcggagaacggagggcggcctccccac

SEQ ID NO: 1406 - DNA, 60 bp, Artificial Sequence
  Description of Artificial Sequence: targeting sequence/synthetic sequence
aactcggttctcaattccaacgctatcaagaacctgcccccaccgctgggcggcgctgcg

SEQ ID NO: 1407 - DNA, 60 bp, Artificial Sequence
  Description of Artificial Sequence: targeting sequence/synthetic sequence
gagagcggcagcagcagcaggagcagcagcaacaacagcagcatctctcgtcccgctgcg

SEQ ID NO: 1408 - DNA, 60 bp, Artificial Sequence
  Description of Artificial Sequence: targeting sequence/synthetic sequence
ctcatgcagaattcaaccaaagcgcctctcaagagatcaaatgttgagaaggtgactaac

SEQ ID NO: 1409 - DNA, 60 bp, Artificial Sequence
  Description of Artificial Sequence: targeting sequence/synthetic sequence
gttctcaattccaacgctatcaagaacctgcccccaccgctgggcggcgctgcggggcac

SEQ ID NO: 1410 - DNA, 60 bp, Artificial Sequence
  Description of Artificial Sequence: targeting sequence/synthetic sequence
atgatcgtggctgccatccaggccgagaagaaccgcgctggctcctcgcgccagtccatt

SEQ ID NO: 1411 - DNA, 60 bp, Artificial Sequence
  Description of Artificial Sequence: targeting sequence/synthetic sequence
atgaccaaccaggacaacaagatcgtggtcaagaacgccaccaagagcaacgtgaacaat

SEQ ID NO: 1412 - DNA, 60 bp, Artificial Sequence
  Description of Artificial Sequence: targeting sequence/synthetic sequence
cttgcggctgccggctacgatgtagaaaaaaacaacagccgtatcaagcttggcctcaag

SEQ ID NO: 1413 - DNA, 60 bp, Artificial Sequence
  Description of Artificial Sequence: targeting sequence/synthetic sequence
gtggctgccatccaggccgagaagaaccgcgctggctcctcgcgccagtccattcagaag

SEQ ID NO: 1414 - DNA, 60 bp, Artificial Sequence
  Description of Artificial Sequence: targeting sequence/synthetic sequence
ggcatagttgtttatactggacacgacaccaaactcatgcagaattcaaccaaagcgcct

SEQ ID NO: 1415 - DNA, 60 bp, Artificial Sequence
  Description of Artificial Sequence: targeting sequence/synthetic sequence
gctctcaaggagaacggcggcgccagactggccgagtaccacgccaaggccaccgagcat

SEQ ID NO: 1416 - DNA, 60 bp, Artificial Sequence
  Description of Artificial Sequence: targeting sequence/synthetic sequence
cggaagaacggccccatcgacatcagcaacaccgacaacttcgtgcggaagaacgacctg

SEQ ID NO: 1417 - DNA, 60 bp, Artificial Sequence
  Description of Artificial Sequence: targeting sequence/synthetic sequence
aaggaaattcaaaatgctgtcaacggggtgaaacagataaagactctcatagaaaaaaca

SEQ ID NO: 1418 - DNA, 60 bp, Artificial Sequence
  Description of Artificial Sequence: targeting sequence/synthetic sequence
aataaggaaattcaaaatgctgtcaacggggtgaaacagataaagactctcatagaaaaa

SEQ ID NO: 1419 - DNA, 60 bp, Artificial Sequence
  Description of Artificial Sequence: targeting sequence/synthetic sequence
aacggcggcgccagactggccgagtaccacgccaaggccaccgagcatctgagcacgctc

SEQ ID NO: 1420 - DNA, 60 bp, Artificial Sequence
  Description of Artificial Sequence: targeting sequence/synthetic sequence
gcgctggcagccgctggctatgacgtggagaagaacaacagccgcatcaagctgggtctc

SEQ ID NO: 1421 - DNA, 60 bp, Artificial Sequence
  Description of Artificial Sequence: targeting sequence/synthetic sequence
gagaatgacaacttccaggatgacccccacgcgggactccctcagctcggcaagagactg

SEQ ID NO: 1422 - DNA, 60 bp, Artificial Sequence
  Description of Artificial Sequence: targeting sequence/synthetic sequence
tccaacgctatcaagaacctgcccccaccgctgggcggcgctgcggggcacccaggctct

SEQ ID NO: 1423 - DNA, 60 bp, Artificial Sequence
  Description of Artificial Sequence: targeting sequence/synthetic sequence
agcagcagcaggagcagcagcaacaacagcagcatctctcgtcccgctgcgcccccagag

SEQ ID NO: 1424 - DNA, 60 bp, Artificial Sequence
  Description of Artificial Sequence: targeting sequence/synthetic sequence
gaggtgcacaacgccaagaccaagccccgggaggaacagtacaacagcacctaccgggtg

SEQ ID NO: 1425 - DNA, 60 bp, Artificial Sequence
  Description of Artificial Sequence: targeting sequence/synthetic sequence
gtggacttccgcatccacgtggagaaccagacgcgggctcgggacgatgtgagccgtaag

SEQ ID NO: 1426 - DNA, 60 bp, Artificial Sequence
  Description of Artificial Sequence: targeting sequence/synthetic sequence
caggacaacacatgtgaggagtaccacacagtggggccccactcctgccacatccccaag

SEQ ID NO: 1427 - DNA, 60 bp, Artificial Sequence
  Description of Artificial Sequence: targeting sequence/synthetic sequence
cgcagaaatggacctgaattttccaatgacatcaagaaaaggaaggtggatgataaggac

SEQ ID NO: 1428 - DNA, 60 bp, Artificial Sequence
  Description of Artificial Sequence: targeting sequence/synthetic sequence
ggcacccagggccgcgcctgcaacaagacggctccccaggccagcggctgtgacctcatg

SEQ ID NO: 1429 - DNA, 60 bp, Artificial Sequence
  Description of Artificial Sequence: targeting sequence/synthetic sequence
ctggtgggttatttggatcgcaacctggagaaaaacagcaccaagcaggagatcctggct

SEQ ID NO: 1430 - DNA, 60 bp, Artificial Sequence
  Description of Artificial Sequence: targeting sequence/synthetic sequence
atgcagaattcaaccaaagcgcctctcaagagatcaaatgttgagaaggtgactaacgtg

SEQ ID NO: 1431 - DNA, 60 bp, Artificial Sequence
  Description of Artificial Sequence: targeting sequence/synthetic sequence
ggcagtgtgggcacccagggccgcgcctgcaacaagacggctccccaggccagcggctgt

SEQ ID NO: 1432 - DNA, 60 bp, Artificial Sequence
  Description of Artificial Sequence: targeting sequence/synthetic sequence
aacaacaagaccatgaaccgggcggagaacggagggcggcctccccaccacccctttgag

SEQ ID NO: 1433 - DNA, 60 bp, Artificial Sequence
  Description of Artificial Sequence: targeting sequence/synthetic sequence
ggccaggacaacacatgtgaggagtaccacacagtggggccccactcctgccacatcccc

SEQ ID NO: 1434 - DNA, 60 bp, Artificial Sequence
  Description of Artificial Sequence: targeting sequence/synthetic sequence
aagctggtgggttatttggatcgcaacctggagaaaaacagcaccaagcaggagatcctg

SEQ ID NO: 1435 - DNA, 60 bp, Artificial Sequence
  Description of Artificial Sequence: targeting sequence/synthetic sequence
atcattcggaagaacggccccatcgacatcagcaacaccgacaacttcgtgcggaagaac

SEQ ID NO: 1436 - DNA, 60 bp, Artificial Sequence
  Description of Artificial Sequence: targeting sequence/synthetic sequence
aatgacaacttccaggatgacccccacgcgggactccctcagctcggcaagagactgcct

SEQ ID NO: 1437 - DNA, 60 bp, Artificial Sequence
  Description of Artificial Sequence: targeting sequence/synthetic sequence
ctgcccggcatgaccaaccaggacaacaagatcgtggtcaagaacgccaccaagagcaac

SEQ ID NO: 1438 - DNA, 60 bp, Artificial Sequence
  Description of Artificial Sequence: targeting sequence/synthetic sequence
ggacacgacaccaaactcatgcagaattcaaccaaagcgcctctcaagagatcaaatgtt

SEQ ID NO: 1439 - DNA, 60 bp, Artificial Sequence
  Description of Artificial Sequence: targeting sequence/synthetic sequence
ggcggcgccagactggccgagtaccacgccaaggccaccgagcatctgagcacgctcagc

SEQ ID NO: 1440 - DNA, 60 bp, Artificial Sequence
  Description of Artificial Sequence: targeting sequence/synthetic sequence
gacaacacatgtgaggagtaccacacagtggggccccactcctgccacatccccaaggac

SEQ ID NO: 1441 - DNA, 60 bp, Artificial Sequence
  Description of Artificial Sequence: targeting sequence/synthetic sequence
gtgatcattcggaagaacggccccatcgacatcagcaacaccgacaacttcgtgcggaag

SEQ ID NO: 1442 - DNA, 60 bp, Artificial Sequence
  Description of Artificial Sequence: targeting sequence/synthetic sequence
tatgacacctcggacagcgatgactatcacctcctaaaggacctagaggaaggcatccaa

SEQ ID NO: 1443 - DNA, 60 bp, Artificial Sequence
  Description of Artificial Sequence: targeting sequence/synthetic sequence
gtgtatgacacctcggacagcgatgactatcacctcctaaaggacctagaggaaggcatc

SEQ ID NO: 1444 - DNA, 60 bp, Artificial Sequence
  Description of Artificial Sequence: targeting sequence/synthetic sequence
acctacatcgaggaaagcctgaacaagatcacccagaacagcggcaacgacgtgcggaac

SEQ ID NO: 1445 - DNA, 60 bp, Artificial Sequence
  Description of Artificial Sequence: targeting sequence/synthetic sequence
gagagcctgaacaagatcacccagaacagcggcaacgacgtgcggaacttcgaggaattc

SEQ ID NO: 1446 - DNA, 60 bp, Artificial Sequence
  Description of Artificial Sequence: targeting sequence/synthetic sequence
gccttccggaccggcgtgccccctaagaacgtggagtacaccgagggcgaggaagccaag

SEQ ID NO: 1447 - DNA, 60 bp, Artificial Sequence
  Description of Artificial Sequence: targeting sequence/synthetic sequence
cggtgggccttccgggccggcgtgccccctaagaacgtggagtacaccgagggcgaggaa

SEQ ID NO: 1448 - DNA, 60 bp, Artificial Sequence
  Description of Artificial Sequence: targeting sequence/synthetic sequence
aagatgcagagagcccctcgcgacagtgacgctggcagggagggacaggaaccacagcct

SEQ ID NO: 1449 - DNA, 60 bp, Artificial Sequence
  Description of Artificial Sequence: targeting sequence/synthetic sequence
tctggtgccactaccacagctccttctctgagtggtaaaggcaatcctgaggaagaggat

SEQ ID NO: 1450 - DNA, 60 bp, Artificial Sequence
  Description of Artificial Sequence: targeting sequence/synthetic sequence
atgcagagagcccctcgcgacagtgacgctggcagggagggacaggaaccacagcctagg

SEQ ID NO: 1451 - DNA, 60 bp, Artificial Sequence
  Description of Artificial Sequence: targeting sequence/synthetic sequence
ggctccagctccaacagcacccgagagccgcccgcctcgggtcgggtggcgttggtaaag

SEQ ID NO: 1452 - DNA, 60 bp, Artificial Sequence
  Description of Artificial Sequence: targeting sequence/synthetic sequence
cagcaccagacagtgctggaactgacagagactggggtggaggcggctgcagcctccgcc

SEQ ID NO: 1453 - DNA, 60 bp, Artificial Sequence
  Description of Artificial Sequence: targeting sequence/synthetic sequence
tctgcgatgcagcaccagacagtgctggaactgacagagactggggtggaggcggctgca

SEQ ID NO: 1454 - DNA, 60 bp, Artificial Sequence
  Description of Artificial Sequence: targeting sequence/synthetic sequence
atccattctggtgccactaccacagctccttctctgagtggtaaaggcaatcctgaggaa

SEQ ID NO: 1455 - DNA, 60 bp, Artificial Sequence
  Description of Artificial Sequence: targeting sequence/synthetic sequence
cataaggtggtggagcggacacagaacgtcactgagaaggtcacccaggtcctgtccctg

SEQ ID NO: 1456 - DNA, 60 bp, Artificial Sequence
  Description of Artificial Sequence: targeting sequence/synthetic sequence
cggggagacgccgacaatgacatggtcaagattgagaacctgaccaaggtctacaagtcc

SEQ ID NO: 1457 - DNA, 60 bp, Artificial Sequence
  Description of Artificial Sequence: targeting sequence/synthetic sequence
ttttccaatgacatcaagaaaaggaaggtggatgataaggactccagccactatgacagt

SEQ ID NO: 1458 - DNA, 60 bp, Artificial Sequence
  Description of Artificial Sequence: targeting sequence/synthetic sequence
agtcttaaagcatccagcacaatggcaaagtcagagaacttggtgaagagccatgtccag

SEQ ID NO: 1459 - DNA, 60 bp, Artificial Sequence
  Description of Artificial Sequence: targeting sequence/synthetic sequence
gacgccgacaatgacatggtcaagattgagaacctgaccaaggtctacaagtcccggaag

SEQ ID NO: 1460 - DNA, 60 bp, Artificial Sequence
  Description of Artificial Sequence: targeting sequence/synthetic sequence
atccagcgggtgaacaatagctccaccaacgacaacctggtgcggaagaacgaccaggtg

SEQ ID NO: 1461 - DNA, 60 bp, Artificial Sequence
  Description of Artificial Sequence: targeting sequence/synthetic sequence
tctactcaaaacaaaagagccaacagaacagaagaaaatgtttcagacggttccccaaat

SEQ ID NO: 1462 - DNA, 60 bp, Artificial Sequence
  Description of Artificial Sequence: targeting sequence/synthetic sequence
tatactggacacgacaccaaactcatgcagaattcaaccaaagcgcctctcaagagatca

SEQ ID NO: 1463 - DNA, 60 bp, Artificial Sequence
  Description of Artificial Sequence: targeting sequence/synthetic sequence
agacttgagaatgaaataccaaaaacgtctggcagcgagatggcaaacaaacgtatgaaa

SEQ ID NO: 1464 - DNA, 60 bp, Artificial Sequence
  Description of Artificial Sequence: targeting sequence/synthetic sequence
caaaacaaaagagccaacagaacagaagaaaatgtttcagacggttccccaaatgccggt

SEQ ID NO: 1465 - DNA, 60 bp, Artificial Sequence
  Description of Artificial Sequence: targeting sequence/synthetic sequence
cagggaagtaagtacgtcaataaggaaattcaaaatgctgtcaacggggtgaaacagata

SEQ ID NO: 1466 - DNA, 60 bp, Artificial Sequence
  Description of Artificial Sequence: targeting sequence/synthetic sequence
ctccggggagacgccgacaatgacatggtcaagattgagaacctgaccaaggtctacaag

SEQ ID NO: 1467 - DNA, 60 bp, Artificial Sequence
  Description of Artificial Sequence: targeting sequence/synthetic sequence
aacgtggacttccgcatccacgtggagaaccagacgcgggctcgggacgatgtgagccgt

SEQ ID NO: 1468 - DNA, 60 bp, Artificial Sequence
  Description of Artificial Sequence: targeting sequence/synthetic sequence
attaaaaggaaggtttcatcttcaaaaccagaagaaaataaaattcgtcaggaagattta

SEQ ID NO: 1469 - DNA, 60 bp, Artificial Sequence
  Description of Artificial Sequence: targeting sequence/synthetic sequence
gtggtcaagaacgccaccaagagcaacgtgaacaatgccgtgaacaccctggtggagcgg

SEQ ID NO: 1470 - DNA, 60 bp, Artificial Sequence
  Description of Artificial Sequence: targeting sequence/synthetic sequence
aaagggttgattgatgaagtcaatcaagattttacaaacagaataaataagctcaaaaat

SEQ ID NO: 1471 - DNA, 60 bp, Artificial Sequence
  Description of Artificial Sequence: targeting sequence/synthetic sequence
attctcacccaaggacaaataaatagcacttcaggacttaataaggagtccttcaggtat

SEQ ID NO: 1472 - DNA, 60 bp, Artificial Sequence
  Description of Artificial Sequence: targeting sequence/synthetic sequence
agctccaacagcacccgagagccgcccgcctcgggtcgggtggcgttggtaaaggtgctg

SEQ ID NO: 1473 - DNA, 60 bp, Artificial Sequence
  Description of Artificial Sequence: targeting sequence/synthetic sequence
actgctgcccaccccgagttgaagaccccactaaccgccaacatcacaaaatccggaaac

SEQ ID NO: 1474 - DNA, 60 bp, Artificial Sequence
  Description of Artificial Sequence: targeting sequence/synthetic sequence
aaggtggtggagcggacacagaacgtcactgagaaggtcacccaggtcctgtccctgggc

SEQ ID NO: 1475 - DNA, 60 bp, Artificial Sequence
  Description of Artificial Sequence: targeting sequence/synthetic sequence
aaaagagccaacagaacagaagaaaatgtttcagacggttccccaaatgccggttctgtg

SEQ ID NO: 1476 - DNA, 60 bp, Artificial Sequence
  Description of Artificial Sequence: targeting sequence/synthetic sequence
tggaaggctgcgattcccagtgccctggacaccaacagctcgaagagcacctcctccttc

SEQ ID NO: 1477 - DNA, 60 bp, Artificial Sequence
  Description of Artificial Sequence: targeting sequence/synthetic sequence
gccttagcggccggtggctacgacgtggagaagaataacagccgcattaagctgggcctc

SEQ ID NO: 1478 - DNA, 60 bp, Artificial Sequence
  Description of Artificial Sequence: targeting sequence/synthetic sequence
gaaaaagtctccgtgtcaactcagacaaagaagttaagtgcctcttcaccaagaatgctg

SEQ ID NO: 1479 - DNA, 60 bp, Artificial Sequence
  Description of Artificial Sequence: targeting sequence/synthetic sequence
aacattaaaaggaaggtttcatcttcaaaaccagaagaaaataaaattcgtcaggaagat

SEQ ID NO: 1480 - DNA, 60 bp, Artificial Sequence
  Description of Artificial Sequence: targeting sequence/synthetic sequence
gtgagcaagggcaccctggtgcagaccaagggcactggtgcttctggctcctttaaactc

SEQ ID NO: 1481 - DNA, 60 bp, Artificial Sequence
  Description of Artificial Sequence: targeting sequence/synthetic sequence
gagaatgaaataccaaaaacgtctggcagcgagatggcaaacaaacgtatgaaagtaaaa

SEQ ID NO: 1482 - DNA, 60 bp, Artificial Sequence
  Description of Artificial Sequence: targeting sequence/synthetic sequence
gtgagcaagggcaccctggtgcagaccaagggcaccggcgcgtcgggttccttcaaactc

SEQ ID NO: 1483 - DNA, 60 bp, Artificial Sequence
  Description of Artificial Sequence: targeting sequence/synthetic sequence
gtgagcaaccagaccgagctggaccgggaggtgctggtgggcaaggtgaagcacgccgtg

SEQ ID NO: 1484 - DNA, 60 bp, Artificial Sequence
  Description of Artificial Sequence: targeting sequence/synthetic sequence
ggagacgccgacaatgacatggtcaagattgagaacctgaccaaggtctacaagtcccgg

SEQ ID NO: 1485 - DNA, 60 bp, Artificial Sequence
  Description of Artificial Sequence: targeting sequence/synthetic sequence
gtgagcgccaccttgaactcggttctcaattccaacgctatcaagaacctgcccccaccg

SEQ ID NO: 1486 - DNA, 60 bp, Artificial Sequence
  Description of Artificial Sequence: targeting sequence/synthetic sequence
aacaatatcaagttccgggccatcggccacagcgacaacagcgtgccccctttcaacaat

SEQ ID NO: 1487 - DNA, 60 bp, Artificial Sequence
  Description of Artificial Sequence: targeting sequence/synthetic sequence
aaggctgcgattcccagtgccctggacaccaacagctcgaagagcacctcctccttcccc

SEQ ID NO: 1488 - DNA, 60 bp, Artificial Sequence
  Description of Artificial Sequence: targeting sequence/synthetic sequence
cagagcgccaaggacaacaatatcaagttccgggccatcggccacagcgacaacagcgtg

SEQ ID NO: 1489 - DNA, 60 bp, Artificial Sequence
  Description of Artificial Sequence: targeting sequence/synthetic sequence
aagaacaataagatcgccggcgtgaacaatcggaccgagtacgtggagaccacaagcacc

SEQ ID NO: 1490 - DNA, 60 bp, Artificial Sequence
  Description of Artificial Sequence: targeting sequence/synthetic sequence
aacagcacccgagagccgcccgcctcgggtcgggtggcgttggtaaaggtgctggacaag

SEQ ID NO: 1491 - DNA, 60 bp, Artificial Sequence
  Description of Artificial Sequence: targeting sequence/synthetic sequence
agcgccaaggacaacaatatcaagttccgggccatcggccacagcgacaacagcgtgccc

SEQ ID NO: 1492 - DNA, 60 bp, Artificial Sequence
  Description of Artificial Sequence: targeting sequence/synthetic sequence
aaaaggaaggtttcatcttcaaaaccagaagaaaataaaattcgtcaggaagatttaaca

SEQ ID NO: 1493 - DNA, 60 bp, Artificial Sequence
  Description of Artificial Sequence: targeting sequence/synthetic sequence
gcgcttgcggctgccggctacgatgtagaaaaaaacaacagccgtatcaagcttggcctc

SEQ ID NO: 1494 - DNA, 60 bp, Artificial Sequence
  Description of Artificial Sequence: targeting sequence/synthetic sequence
caggccaagttcgtgagcaaccagaccgagctggaccgggaggtgctggtgggcaaggtg

SEQ ID NO: 1495 - DNA, 60 bp, Artificial Sequence
  Description of Artificial Sequence: targeting sequence/synthetic sequence
cccccagagccgcggccgcagcaacagccgcagccccgcagccccgcagcccggagagcc

SEQ ID NO: 1496 - DNA, 60 bp, Artificial Sequence
  Description of Artificial Sequence: targeting sequence/synthetic sequence
actgtgaccccaaaaggacagcttcccggaggcaaggcacccccaaaagcaggatctgtc

SEQ ID NO: 1497 - DNA, 60 bp, Artificial Sequence
  Description of Artificial Sequence: targeting sequence/synthetic sequence
aagagcttggtgagcaagggcaccctggtgcagaccaagggcactggtgcttctggctcc

SEQ ID NO: 1498 - DNA, 60 bp, Artificial Sequence
  Description of Artificial Sequence: targeting sequence/synthetic sequence
cagggagcttcagtcaactccagttcacaaactgcggcccaagttacaaaaggtgtgaag

SEQ ID NO: 1499 - DNA, 60 bp, Artificial Sequence
  Description of Artificial Sequence: targeting sequence/synthetic sequence
gccaagttcgtgagcaaccagaccgagctggaccgggaggtgctggtgggcaaggtgaag

SEQ ID NO: 1500 - DNA, 60 bp, Artificial Sequence
  Description of Artificial Sequence: targeting sequence/synthetic sequence
gcgtcctccgtggaaaccaagcccggcgcctcaaaggtggctacaaaaactaaggcaacg

SEQ ID NO: 1501 - DNA, 60 bp, Artificial Sequence
  Description of Artificial Sequence: targeting sequence/synthetic sequence
gcgctggcggccgcaggctacgacgtggagaagaacaacagccgcattaagctgggcatt

SEQ ID NO: 1502 - DNA, 60 bp, Artificial Sequence
  Description of Artificial Sequence: targeting sequence/synthetic sequence
gagccgcggccgcagcaacagccgcagccccgcagccccgcagcccggagagccgccgcc

SEQ ID NO: 1503 - DNA, 60 bp, Artificial Sequence
  Description of Artificial Sequence: targeting sequence/synthetic sequence
ctcaattccaacgctatcaagaacctgcccccaccgctgggcggcgctgcggggcaccca

SEQ ID NO: 1504 - DNA, 60 bp, Artificial Sequence
  Description of Artificial Sequence: targeting sequence/synthetic sequence
ccaccggagctggagaacaacaagaccatgaaccgggcggagaacggagggcggcctccc

SEQ ID NO: 1505 - DNA, 60 bp, Artificial Sequence
  Description of Artificial Sequence: targeting sequence/synthetic sequence
catctgaccagccgacaccaagaagcagagatggcccagaatgcagttcgccttcactat

SEQ ID NO: 1506 - DNA, 60 bp, Artificial Sequence
  Description of Artificial Sequence: targeting sequence/synthetic sequence
aaggcatataattctgctgggacaggcccctctagtgcaacagtcaatgtgacaacccga

SEQ ID NO: 1507 - DNA, 60 bp, Artificial Sequence
  Description of Artificial Sequence: targeting sequence/synthetic sequence
aagaactcacgactacagttcaacaaggtgaaggtggaggacgctggggagtatgtctgc

SEQ ID NO: 1508 - DNA, 60 bp, Artificial Sequence
  Description of Artificial Sequence: targeting sequence/synthetic sequence
tcatccatgagtaaccacacaaaggaaagggtgacaatgaccaaagtgacactggagaat

SEQ ID NO: 1509 - DNA, 60 bp, Artificial Sequence
  Description of Artificial Sequence: targeting sequence/synthetic sequence
gggcaggggccaaacaccaaggctgctgctcctgctaagggcagtgggtccaaggtggta

SEQ ID NO: 1510 - DNA, 60 bp, Artificial Sequence
  Description of Artificial Sequence: targeting sequence/synthetic sequence
gggccaaacaccaaggctgctgctcctgctaagggcagtgggtccaaggtggtacctgca

SEQ ID NO: 1511 - DNA, 60 bp, Artificial Sequence
  Description of Artificial Sequence: targeting sequence/synthetic sequence
aaggccttagcggccggtggctacgacgtggagaagaataacagccgcattaagctgggc

SEQ ID NO: 1512 - DNA, 60 bp, Artificial Sequence
  Description of Artificial Sequence: targeting sequence/synthetic sequence
ggcaacaaccgcaccattgaacccgaggcgctgcggcggggcaacatgagctccctgggc

SEQ ID NO: 1513 - DNA, 60 bp, Artificial Sequence
  Description of Artificial Sequence: targeting sequence/synthetic sequence
ctgaccagccgacaccaagaagcagagatggcccagaatgcagttcgccttcactatgga

SEQ ID NO: 1514 - DNA, 60 bp, Artificial Sequence
  Description of Artificial Sequence: targeting sequence/synthetic sequence
tataattctgctgggacaggcccctctagtgcaacagtcaatgtgacaacccgaaagcca

SEQ ID NO: 1515 - DNA, 60 bp, Artificial Sequence
  Description of Artificial Sequence: targeting sequence/synthetic sequence
ggcccctctagtgcaacagtcaatgtgacaacccgaaagccaccaccaagtcaacccccc

SEQ ID NO: 1516 - DNA, 60 bp, Artificial Sequence
  Description of Artificial Sequence: targeting sequence/synthetic sequence
aagatccagcgggtgaacaatagctccaccaacgacaacctggtgcggaagaacgaccag

SEQ ID NO: 1517 - DNA, 60 bp, Artificial Sequence
  Description of Artificial Sequence: targeting sequence/synthetic sequence
aaccgcaccattgaacccgaggcgctgcggcggggcaacatgagctccctgggcttcacg

SEQ ID NO: 1518 - DNA, 60 bp, Artificial Sequence
  Description of Artificial Sequence: targeting sequence/synthetic sequence
tcacaaactgcggcccaagttacaaaaggtgtgaagaggaaagcagatacaacaactcct

SEQ ID NO: 1519 - DNA, 60 bp, Artificial Sequence
  Description of Artificial Sequence: targeting sequence/synthetic sequence
gctgacgtgaaggccgggcctgcccagacccttattcggccccaggacatgaagggtgcc

SEQ ID NO: 1520 - DNA, 60 bp, Artificial Sequence
  Description of Artificial Sequence: targeting sequence/synthetic sequence
gggttgattgatgaagtcaatcaagattttacaaacagaataaataagctcaaaaattca

SEQ ID NO: 1521 - DNA, 60 bp, Artificial Sequence
  Description of Artificial Sequence: targeting sequence/synthetic sequence
agcgtgttcctgaagaacaataagatcgccggcgtgaacaatcggaccgagtacgtggag

SEQ ID NO: 1522 - DNA, 60 bp, Artificial Sequence
  Description of Artificial Sequence: targeting sequence/synthetic sequence
agcgccaccttgaactcggttctcaattccaacgctatcaagaacctgcccccaccgctg

SEQ ID NO: 1523 - DNA, 60 bp, Artificial Sequence
  Description of Artificial Sequence: targeting sequence/synthetic sequence
ggcacgcagggccgtctctgcaaccgcacgtcgcccggcgcggacggctgtgacaccatg

SEQ ID NO: 1524 - DNA, 60 bp, Artificial Sequence
  Description of Artificial Sequence: targeting sequence/synthetic sequence
cataatgccaagacaaagccgcgggaggagcagtacaacagcacgtaccgtgtggtcagc

SEQ ID NO: 1525 - DNA, 60 bp, Artificial Sequence
  Description of Artificial Sequence: targeting sequence/synthetic sequence
agggcgagagcattaaatgaaagcaaaagagttaataatggcaacacggctccagaagac

SEQ ID NO: 1526 - DNA, 60 bp, Artificial Sequence
  Description of Artificial Sequence: targeting sequence/synthetic sequence
aactcacgactacagttcaacaaggtgaaggtggaggacgctggggagtatgtctgcgag

SEQ ID NO: 1527 - DNA, 60 bp, Artificial Sequence
  Description of Artificial Sequence: targeting sequence/synthetic sequence
ctgaagaacaataagatcgccggcgtgaacaatcggaccgagtacgtggagaccacaagc

SEQ ID NO: 1528 - DNA, 60 bp, Artificial Sequence
  Description of Artificial Sequence: targeting sequence/synthetic sequence
ggagcttcagtcaactccagttcacaaactgcggcccaagttacaaaaggtgtgaagagg

SEQ ID NO: 1529 - DNA, 60 bp, Artificial Sequence
  Description of Artificial Sequence: targeting sequence/synthetic sequence
cctaaagctgggcaggggccaaacaccaaggctgctgctcctgctaagggcagtgggtcc

SEQ ID NO: 1530 - DNA, 60 bp, Artificial Sequence
  Description of Artificial Sequence: targeting sequence/synthetic sequence
gtctccaacaaagccctcccagcccccatcgagaaaaccatctccaaagccaaagggcag

SEQ ID NO: 1531 - DNA, 60 bp, Artificial Sequence
  Description of Artificial Sequence: targeting sequence/synthetic sequence
cagcaggcccaaacccccacaggcaagcaaactgacaaaaccaagagtaacatgaaaggt

SEQ ID NO: 1532 - DNA, 60 bp, Artificial Sequence
  Description of Artificial Sequence: targeting sequence/synthetic sequence
ggagtgagcgccaccttgaactcggttctcaattccaacgctatcaagaacctgccccca

SEQ ID NO: 1533 - DNA, 60 bp, Artificial Sequence
  Description of Artificial Sequence: targeting sequence/synthetic sequence
gcagcccctccaggccagaagggccaggccaacgccaccaggattccagcaaaaaccccg

SEQ ID NO: 1534 - DNA, 60 bp, Artificial Sequence
  Description of Artificial Sequence: targeting sequence/synthetic sequence
caggacaacaagatcgtggtcaagaacgccaccaagagcaacgtgaacaatgccgtgaac

SEQ ID NO: 1535 - DNA, 60 bp, Artificial Sequence
  Description of Artificial Sequence: targeting sequence/synthetic sequence
ttgaactcggttctcaattccaacgctatcaagaacctgcccccaccgctgggcggcgct

SEQ ID NO: 1536 - DNA, 60 bp, Artificial Sequence
  Description of Artificial Sequence: targeting sequence/synthetic sequence
gtggaaaccaagcccggcgcctcaaaggtggctacaaaaactaaggcaacgggtgcatct

SEQ ID NO: 1537 - DNA, 60 bp, Artificial Sequence
  Description of Artificial Sequence: targeting sequence/synthetic sequence
attattgcacccaaggttaaagatcgaacacacaatgtgactgagaaagtgacccaggtt

SEQ ID NO: 1538 - DNA, 60 bp, Artificial Sequence
  Description of Artificial Sequence: targeting sequence/synthetic sequence
ggcctggtggaggtgggcggaagcgccaagtacctgaacaataccaagaaataccagaac

SEQ ID NO: 1539 - DNA, 60 bp, Artificial Sequence
  Description of Artificial Sequence: targeting sequence/synthetic sequence
gttaaagatcgaacacacaatgtgactgagaaagtgacccaggttctctctttaggagca

SEQ ID NO: 1540 - DNA, 60 bp, Artificial Sequence
  Description of Artificial Sequence: targeting sequence/synthetic sequence
aacaaaagagccaacagaacagaagaaaatgtttcagacggttccccaaatgccggttct

SEQ ID NO: 1541 - DNA, 60 bp, Artificial Sequence
  Description of Artificial Sequence: targeting sequence/synthetic sequence
aagagcctggtgagcaagggcaccctggtgcagaccaagggcaccggcgcgtcgggttcc

SEQ ID NO: 1542 - DNA, 60 bp, Artificial Sequence
  Description of Artificial Sequence: targeting sequence/synthetic sequence
tggaacagacaaagcagcacatctgtcattgaaacaaataaaacatcggtggagctttct

SEQ ID NO: 1543 - DNA, 60 bp, Artificial Sequence
  Description of Artificial Sequence: targeting sequence/synthetic sequence
tacgaggctgccgaaagcgacatcatgaagagacagcccaggaacccgcggacggacaaa

SEQ ID NO: 1544 - DNA, 60 bp, Artificial Sequence
  Description of Artificial Sequence: targeting sequence/synthetic sequence
ttcctgaagaacaataagatcgccggcgtgaacaatcggaccgagtacgtggagaccaca

SEQ ID NO: 1545 - DNA, 60 bp, Artificial Sequence
  Description of Artificial Sequence: targeting sequence/synthetic sequence
ggctggaaggctgcgattcccagtgccctggacaccaacagctcgaagagcacctcctcc

SEQ ID NO: 1546 - DNA, 60 bp, Artificial Sequence
  Description of Artificial Sequence: targeting sequence/synthetic sequence
aatgccaagacaaagccgcgggaggagcagttcaacagcacgtaccgtgtggtcagcgtc

SEQ ID NO: 1547 - DNA, 60 bp, Artificial Sequence
  Description of Artificial Sequence: targeting sequence/synthetic sequence
gacaacaagatcgtggtcaagaacgccaccaagagcaacgtgaacaatgccgtgaacacc

SEQ ID NO: 1548 - DNA, 60 bp, Artificial Sequence
  Description of Artificial Sequence: targeting sequence/synthetic sequence
gtgttcctgaagaacaataagatcgccggcgtgaacaatcggaccgagtacgtggagacc

SEQ ID NO: 1549 - DNA, 60 bp, Artificial Sequence
  Description of Artificial Sequence: targeting sequence/synthetic sequence
cgcaagctgaccgacatggaggctcagctcctgaaccagacatcaagaatggatgcccag

SEQ ID NO: 1550 - DNA, 60 bp, Artificial Sequence
  Description of Artificial Sequence: targeting sequence/synthetic sequence
gcatataattctgctgggacaggcccctctagtgcaacagtcaatgtgacaacccgaaag

SEQ ID NO: 1551 - DNA, 60 bp, Artificial Sequence
  Description of Artificial Sequence: targeting sequence/synthetic sequence
cagatccgcaagctgaccgacatggaggctcagctcctgaaccagacatcaagaatggat

SEQ ID NO: 1552 - DNA, 60 bp, Artificial Sequence
  Description of Artificial Sequence: targeting sequence/synthetic sequence
caggggccaaacaccaaggctgctgctcctgctaagggcagtgggtccaaggtggtacct

SEQ ID NO: 1553 - DNA, 60 bp, Artificial Sequence
  Description of Artificial Sequence: targeting sequence/synthetic sequence
accaaccaggacaacaagatcgtggtcaagaacgccaccaagagcaacgtgaacaatgcc

SEQ ID NO: 1554 - DNA, 60 bp, Artificial Sequence
  Description of Artificial Sequence: targeting sequence/synthetic sequence
cgactacagttcaacaaggtgaaggtggaggacgctggggagtatgtctgcgaggccgag

SEQ ID NO: 1555 - DNA, 60 bp, Artificial Sequence
  Description of Artificial Sequence: targeting sequence/synthetic sequence
agtaagtacgtcaataaggaaattcaaaatgctgtcaacggggtgaaacagataaagact

SEQ ID NO: 1556 - DNA, 60 bp, Artificial Sequence
  Description of Artificial Sequence: targeting sequence/synthetic sequence
acaggcccctctagtgcaacagtcaatgtgacaacccgaaagccaccaccaagtcaaccc

SEQ ID NO: 1557 - DNA, 60 bp, Artificial Sequence
  Description of Artificial Sequence: targeting sequence/synthetic sequence
aagtacgtcaataaggaaattcaaaatgctgtcaacggggtgaaacagataaagactctc

SEQ ID NO: 1558 - DNA, 60 bp, Artificial Sequence
  Description of Artificial Sequence: targeting sequence/synthetic sequence
attaagagcctggtaagcaagggaacgttggtgcagacaaagggtaccggagcctcgggt

SEQ ID NO: 1559 - DNA, 60 bp, Artificial Sequence
  Description of Artificial Sequence: targeting sequence/synthetic sequence
acggagaaggccctgatcaaagacttccaggggaccccgactttcacctacaaagcggcc

SEQ ID NO: 1560 - DNA, 60 bp, Artificial Sequence
  Description of Artificial Sequence: targeting sequence/synthetic sequence
gagaacaacaagaccatgaaccgggcggagaacggagggcggcctccccaccaccccttt

SEQ ID NO: 1561 - DNA, 60 bp, Artificial Sequence
  Description of Artificial Sequence: targeting sequence/synthetic sequence
ctgggagtgagcgccaccttgaactcggttctcaattccaacgctatcaagaacctgccc

SEQ ID NO: 1562 - DNA, 60 bp, Artificial Sequence
  Description of Artificial Sequence: targeting sequence/synthetic sequence
gagtatgccaacgagaagcacatgctggccctggcccccaacagcactgcacggcggcag

SEQ ID NO: 1563 - DNA, 60 bp, Artificial Sequence
  Description of Artificial Sequence: targeting sequence/synthetic sequence
ggcatgaccaaccaggacaacaagatcgtggtcaagaacgccaccaagagcaacgtgaac

SEQ ID NO: 1564 - DNA, 60 bp, Artificial Sequence
  Description of Artificial Sequence: targeting sequence/synthetic sequence
ttggtgagcaagggcaccctggtgcagaccaagggcactggtgcttctggctcctttaaa

SEQ ID NO: 1565 - DNA, 60 bp, Artificial Sequence
  Description of Artificial Sequence: targeting sequence/synthetic sequence
acagttggaaatcagacatcaacaaaaatcacgaacttaaaaggcagtgtgctgtatcac

SEQ ID NO: 1566 - DNA, 60 bp, Artificial Sequence
  Description of Artificial Sequence: targeting sequence/synthetic sequence
cagttcaacaaggtgaaggtggaggacgctggggagtatgtctgcgaggccgagaacatc

SEQ ID NO: 1567 - DNA, 60 bp, Artificial Sequence
  Description of Artificial Sequence: targeting sequence/synthetic sequence
ctggccaccaacctgatcaagagcggcgtggccaccaagggcctgaacgtgcacggcaag

SEQ ID NO: 1568 - DNA, 60 bp, Artificial Sequence
  Description of Artificial Sequence: targeting sequence/synthetic sequence
ccaaaaggacagcttcccggaggcaaggcacccccaaaagcaggatctgtccccagctcc

SEQ ID NO: 1569 - DNA, 60 bp, Artificial Sequence
  Description of Artificial Sequence: targeting sequence/synthetic sequence
ggaagtaagtacgtcaataaggaaattcaaaatgctgtcaacggggtgaaacagataaag

SEQ ID NO: 1570 - DNA, 60 bp, Artificial Sequence
  Description of Artificial Sequence: targeting sequence/synthetic sequence
tcctccgtggaaaccaagcccggcgcctcaaaggtggctacaaaaactaaggcaacgggt

SEQ ID NO: 1571 - DNA, 60 bp, Artificial Sequence
  Description of Artificial Sequence: targeting sequence/synthetic sequence
actggacacgacaccaaactcatgcagaattcaaccaaagcgcctctcaagagatcaaat

SEQ ID NO: 1572 - DNA, 60 bp, Artificial Sequence
  Description of Artificial Sequence: targeting sequence/synthetic sequence
agagaagctgctgccaacaccaaccgccccagccctggcgggcacgagaggaaactggtg

SEQ ID NO: 1573 - DNA, 60 bp, Artificial Sequence
  Description of Artificial Sequence: targeting sequence/synthetic sequence
ccaggccagaagggccaggccaacgccaccaggattccagcaaaaaccccgcccgctcca

SEQ ID NO: 1574 - DNA, 60 bp, Artificial Sequence
  Description of Artificial Sequence: targeting sequence/synthetic sequence
gtttatactggacacgacaccaaactcatgcagaattcaaccaaagcgcctctcaagaga

SEQ ID NO: 1575 - DNA, 60 bp, Artificial Sequence
  Description of Artificial Sequence: targeting sequence/synthetic sequence
cgcaagaaggagaatgaactgcccacaactcccgtgaagaaggactcccccaagaacatc

SEQ ID NO: 1576 - DNA, 60 bp, Artificial Sequence
  Description of Artificial Sequence: targeting sequence/synthetic sequence
ccaaggaaatcatccattgtgaaaagaccaagaagtgcagagctgtcagaagatgacctg

SEQ ID NO: 1577 - DNA, 60 bp, Artificial Sequence
  Description of Artificial Sequence: targeting sequence/synthetic sequence
ctggagaacaacaagaccatgaaccgggcggagaacggagggcggcctccccaccacccc

SEQ ID NO: 1578 - DNA, 60 bp, Artificial Sequence
  Description of Artificial Sequence: targeting sequence/synthetic sequence
gccgacaatgacatggtcaagattgagaacctgaccaaggtctacaagtcccggaagatt

SEQ ID NO: 1579 - DNA, 60 bp, Artificial Sequence
  Description of Artificial Sequence: targeting sequence/synthetic sequence
tacgtcaataaggaaattcaaaatgctgtcaacggggtgaaacagataaagactctcata

SEQ ID NO: 1580 - DNA, 60 bp, Artificial Sequence
  Description of Artificial Sequence: targeting sequence/synthetic sequence
ctgctccagagcgccaaggacaacaatatcaagttccgggccatcggccacagcgacaac

SEQ ID NO: 1581 - DNA, 60 bp, Artificial Sequence
  Description of Artificial Sequence: targeting sequence/synthetic sequence
aacaacgccatcctgcgtgccaacctgcccaagagcaagggcaacccggcggcttacggc

SEQ ID NO: 1582 - DNA, 60 bp, Artificial Sequence
  Description of Artificial Sequence: targeting sequence/synthetic sequence
gggacaggcccctctagtgcaacagtcaatgtgacaacccgaaagccaccaccaagtcaa

SEQ ID NO: 1583 - DNA, 60 bp, Artificial Sequence
  Description of Artificial Sequence: targeting sequence/synthetic sequence
gtgctgtccaccaagcagacagaagactactgcctcgcatccaacaaggtgggtcgctgc

SEQ ID NO: 1584 - DNA, 60 bp, Artificial Sequence
  Description of Artificial Sequence: targeting sequence/synthetic sequence
gctggggagtatgtctgcgaggccgagaacatcctggggaaggacaccgtccggggccgg

SEQ ID NO: 1585 - DNA, 60 bp, Artificial Sequence
  Description of Artificial Sequence: targeting sequence/synthetic sequence
ttggagaacattaaaaggaaggtttcatcttcaaaaccagaagaaaataaaattcgtcag

SEQ ID NO: 1586 - DNA, 60 bp, Artificial Sequence
  Description of Artificial Sequence: targeting sequence/synthetic sequence
gccacagagaaggctcgcaagcaaggcggcgcggccaaggacaccagggcacagtcggga

SEQ ID NO: 1587 - DNA, 60 bp, Artificial Sequence
  Description of Artificial Sequence: targeting sequence/synthetic sequence
ggcgcagccacagagaaggctcgcaagcaaggcggcgcggccaaggacaccagggcacag

SEQ ID NO: 1588 - DNA, 60 bp, Artificial Sequence
  Description of Artificial Sequence: targeting sequence/synthetic sequence
gctgccaacaccaaccgccccagccctggcgggcacgagaggaaactggtgaccaagctg

SEQ ID NO: 1589 - DNA, 60 bp, Artificial Sequence
  Description of Artificial Sequence: targeting sequence/synthetic sequence
aaccaggacaacaagatcgtggtcaagaacgccaccaagagcaacgtgaacaatgccgtg

SEQ ID NO: 1590 - DNA, 60 bp, Artificial Sequence
  Description of Artificial Sequence: targeting sequence/synthetic sequence
acgacgccaccaccatcgtcacgacctcggaccaccgccagtgtcccacgaacaaccgtc

SEQ ID NO: 1591 - DNA, 60 bp, Artificial Sequence
  Description of Artificial Sequence: targeting sequence/synthetic sequence
ctctaccagatcccaccacagcctcgccgagcagcacccaccacaccgcccccaccagtg

SEQ ID NO: 1592 - DNA, 60 bp, Artificial Sequence
  Description of Artificial Sequence: targeting sequence/synthetic sequence
tacttacctcagcagcagaagaaaaagctacaaactgacattaaggaaaatggcggaaag

SEQ ID NO: 1593 - DNA, 60 bp, Artificial Sequence
  Description of Artificial Sequence: targeting sequence/synthetic sequence
gagaaggccctgatcaaagacttccaggggaccccgactttcacctacaaagcggcccat

SEQ ID NO: 1594 - DNA, 60 bp, Artificial Sequence
  Description of Artificial Sequence: targeting sequence/synthetic sequence
accccctctgccgggggtgctgcttcctccaggacccccaacaggattagcactcgcctg

SEQ ID NO: 1595 - DNA, 60 bp, Artificial Sequence
  Description of Artificial Sequence: targeting sequence/synthetic sequence
caaactgcggcccaagttacaaaaggtgtgaagaggaaagcagatacaacaactcctgca

SEQ ID NO: 1596 - DNA, 60 bp, Artificial Sequence
  Description of Artificial Sequence: targeting sequence/synthetic sequence
aaggttaaagatcgaacacacaatgtgactgagaaagtgacccaggttctctctttagga

SEQ ID NO: 1597 - DNA, 60 bp, Artificial Sequence
  Description of Artificial Sequence: targeting sequence/synthetic sequence
cagaaccgctccaagacgcccaagaaccaggaagccctgcggatggccaacgtggcagag

SEQ ID NO: 1598 - DNA, 60 bp, Artificial Sequence
  Description of Artificial Sequence: targeting sequence/synthetic sequence
cccatcgaaaaagtctccgtgtcaactcagacaaagaagttaagtgcctcttcaccaaga

SEQ ID NO: 1599 - DNA, 60 bp, Artificial Sequence
  Description of Artificial Sequence: targeting sequence/synthetic sequence
gggacacaaggcagagaatgcaaccgtacatcagagggtgcagatggctgcaacctcctc

SEQ ID NO: 1600 - DNA, 60 bp, Artificial Sequence
  Description of Artificial Sequence: targeting sequence/synthetic sequence
gtgaccccaaaaggacagcttcccggaggcaaggcacccccaaaagcaggatctgtcccc

SEQ ID NO: 1601 - DNA, 60 bp, Artificial Sequence
  Description of Artificial Sequence: targeting sequence/synthetic sequence
ggcgcggccaaggacaccagggcacagtcgggagaggctaggaaggtgccccccaagcca

SEQ ID NO: 1602 - DNA, 60 bp, Artificial Sequence
  Description of Artificial Sequence: targeting sequence/synthetic sequence
aaggacttcgacgtgatccggaacgtgatcaaggacaacgccaccttcagccggaagaac

SEQ ID NO: 1603 - DNA, 60 bp, Artificial Sequence
  Description of Artificial Sequence: targeting sequence/synthetic sequence
tccaacaaaggcctcccagcccccatcgagaaaaccatctccaaaaccaaagggcagccc

SEQ ID NO: 1604 - DNA, 60 bp, Artificial Sequence
  Description of Artificial Sequence: targeting sequence/synthetic sequence
gacaccaaactcatgcagaattcaaccaaagcgcctctcaagagatcaaatgttgagaag

SEQ ID NO: 1605 - DNA, 60 bp, Artificial Sequence
  Description of Artificial Sequence: targeting sequence/synthetic sequence
tctagtgcaacagtcaatgtgacaacccgaaagccaccaccaagtcaaccccccggaaac

SEQ ID NO: 1606 - DNA, 60 bp, Artificial Sequence
  Description of Artificial Sequence: targeting sequence/synthetic sequence
gccaagacaaagccgcgggaggagcagtacaacagcacgtaccgtgtggtcagcgtcctc

SEQ ID NO: 1607 - DNA, 60 bp, Artificial Sequence
  Description of Artificial Sequence: targeting sequence/synthetic sequence
gctccccgcgcggctccagcggctcggggatcccggccgggccccgcagggaccatggca

SEQ ID NO: 1608 - DNA, 60 bp, Artificial Sequence
  Description of Artificial Sequence: targeting sequence/synthetic sequence
ctcaagagcttggtgagcaaaggtaccctggtgcagaccaaaggtaccggtgcttctggc

SEQ ID NO: 1609 - DNA, 60 bp, Artificial Sequence
  Description of Artificial Sequence: targeting sequence/synthetic sequence
gtcaactccagttcacaaactgcggcccaagttacaaaaggtgtgaagaggaaagcagat

SEQ ID NO: 1610 - DNA, 60 bp, Artificial Sequence
  Description of Artificial Sequence: targeting sequence/synthetic sequence
ttcattgatcttcctagaaaaaagatctctaatttcactaataagaacatgaaggaggtt

SEQ ID NO: 1611 - DNA, 60 bp, Artificial Sequence
  Description of Artificial Sequence: targeting sequence/synthetic sequence
ccgcaggctgcgggcggcggtcagaagaagggcgacaaggctcccgggggcgggggcgcc

SEQ ID NO: 1612 - DNA, 60 bp, Artificial Sequence
  Description of Artificial Sequence: targeting sequence/synthetic sequence
gccaccccctctgccgggggtgctgcttcctccaggacccccaacaggattagcactcgc

SEQ ID NO: 1613 - DNA, 60 bp, Artificial Sequence
  Description of Artificial Sequence: targeting sequence/synthetic sequence
cgtcatctgaccagccgacaccaagaagcagagatggcccagaatgcagttcgccttcac

SEQ ID NO: 1614 - DNA, 60 bp, Artificial Sequence
  Description of Artificial Sequence: targeting sequence/synthetic sequence
gagaagcacatgctggccctggcccccaacagcactgcacggcggcagctggccagcctg

SEQ ID NO: 1615 - DNA, 60 bp, Artificial Sequence
  Description of Artificial Sequence: targeting sequence/synthetic sequence
gtcaatgacatcttcgagcgcatcgccggcgaggcttcccgcctggcgcattacaacaag

SEQ ID NO: 1616 - DNA, 60 bp, Artificial Sequence
  Description of Artificial Sequence: targeting sequence/synthetic sequence
acccaaggacaaataaatagcacttcaggacttaataaggagtccttcaggtatctgaaa

SEQ ID NO: 1617 - DNA, 60 bp, Artificial Sequence
  Description of Artificial Sequence: targeting sequence/synthetic sequence
aatctcccaaggaaatcatccattgtgaaaagaccaagaagtgcagagctgtcagaagat

SEQ ID NO: 1618 - DNA, 60 bp, Artificial Sequence
  Description of Artificial Sequence: targeting sequence/synthetic sequence
ctggtggaggtgggcggaagcgccaagtacctgaacaataccaagaaataccagaaccag

SEQ ID NO: 1619 - DNA, 60 bp, Artificial Sequence
  Description of Artificial Sequence: targeting sequence/synthetic sequence
gcggcccaagttacaaaaggtgtgaagaggaaagcagatacaacaactcctgcaacttca

SEQ ID NO: 1620 - DNA, 60 bp, Artificial Sequence
  Description of Artificial Sequence: targeting sequence/synthetic sequence
gccaacgagaagcacatgctggccctggcccccaacagcactgcacggcggcagctggcc

SEQ ID NO: 1621 - DNA, 60 bp, Artificial Sequence
  Description of Artificial Sequence: targeting sequence/synthetic sequence
aagtacttacctcagcagcagaagaaaaagctacaaactgacattaaggaaaatggcgga

SEQ ID NO: 1622 - DNA, 60 bp, Artificial Sequence
  Description of Artificial Sequence: targeting sequence/synthetic sequence
gtgcataatgccaagacaaagccgcgggaggagcagtacaacagcacgtaccgtgtggtc

SEQ ID NO: 1623 - DNA, 60 bp, Artificial Sequence
  Description of Artificial Sequence: targeting sequence/synthetic sequence
accccaaaaggacagcttcccggaggcaaggcacccccaaaagcaggatctgtccccagc

SEQ ID NO: 1624 - DNA, 60 bp, Artificial Sequence
  Description of Artificial Sequence: targeting sequence/synthetic sequence
accagcgtgttcctgaagaacaataagatcgccggcgtgaacaatcggaccgagtacgtg

SEQ ID NO: 1625 - DNA, 60 bp, Artificial Sequence
  Description of Artificial Sequence: targeting sequence/synthetic sequence
gacatatttgagcgcatcgcgggcgaggcttcccgcctggcgcattacaacaagcgctcg

SEQ ID NO: 1626 - DNA, 60 bp, Artificial Sequence
  Description of Artificial Sequence: targeting sequence/synthetic sequence
tataaaaacaaagacatgatacaaactctaacaaacaaatctaaaatccaaaatgtagga

SEQ ID NO: 1627 - DNA, 60 bp, Artificial Sequence
  Description of Artificial Sequence: targeting sequence/synthetic sequence
ggccaggccaacgccaccaggattccagcaaaaaccccgcccgctccaaagacaccaccc

SEQ ID NO: 1628 - DNA, 60 bp, Artificial Sequence
  Description of Artificial Sequence: targeting sequence/synthetic sequence
aacaagatcgtggtcaagaacgccaccaagagcaacgtgaacaatgccgtgaacaccctg

SEQ ID NO: 1629 - DNA, 60 bp, Artificial Sequence
  Description of Artificial Sequence: targeting sequence/synthetic sequence
ggcacgaggggccgcacatgcaacaagacgtccaaggccatcgacggctgtgagctgctg

SEQ ID NO: 1630 - DNA, 60 bp, Artificial Sequence
  Description of Artificial Sequence: targeting sequence/synthetic sequence
gcggctccccgcgcggctccagcggctcggggatcccggccgggccccgcagggaccatg

SEQ ID NO: 1631 - DNA, 60 bp, Artificial Sequence
  Description of Artificial Sequence: targeting sequence/synthetic sequence
atccacgtggagaaccagacgcgggctcgggacgatgtgagccgtaagcagctgcggctg

SEQ ID NO: 1632 - DNA, 60 bp, Artificial Sequence
  Description of Artificial Sequence: targeting sequence/synthetic sequence
cttaagaaggccttagcggccggtggctacgacgtggagaagaataacagccgcattaag

SEQ ID NO: 1633 - DNA, 60 bp, Artificial Sequence
  Description of Artificial Sequence: targeting sequence/synthetic sequence
aattctgctgggacaggcccctctagtgcaacagtcaatgtgacaacccgaaagccacca

SEQ ID NO: 1634 - DNA, 60 bp, Artificial Sequence
  Description of Artificial Sequence: targeting sequence/synthetic sequence
gtctgcgaggccgagaacatcctggggaaggacaccgtccggggccggctttacgtcaac

SEQ ID NO: 1635 - DNA, 60 bp, Artificial Sequence
  Description of Artificial Sequence: targeting sequence/synthetic sequence
aagcaaggcggcgcggccaaggacaccagggcacagtcgggagaggctaggaaggtgccc

SEQ ID NO: 1636 - DNA, 60 bp, Artificial Sequence
  Description of Artificial Sequence: targeting sequence/synthetic sequence
aacgccaagaccaagccccgggaggaacagtacaacagcacctaccgggtggtcagcgtg

SEQ ID NO: 1637 - DNA, 60 bp, Artificial Sequence
  Description of Artificial Sequence: targeting sequence/synthetic sequence
caggccaacgccaccaggattccagcaaaaaccccgcccgctccaaagacaccacccagc

SEQ ID NO: 1638 - DNA, 60 bp, Artificial Sequence
  Description of Artificial Sequence: targeting sequence/synthetic sequence
caaacgacgccaccaccatcgtcacgacctcggaccaccgccagtgtcccacgaacaacc

SEQ ID NO: 1639 - DNA, 60 bp, Artificial Sequence
  Description of Artificial Sequence: targeting sequence/synthetic sequence
attgcacccaaggttaaagatcgaacacacaatgtgactgagaaagtgacccaggttctc

SEQ ID NO: 1640 - DNA, 60 bp, Artificial Sequence
  Description of Artificial Sequence: targeting sequence/synthetic sequence
gaggctgccgaaagcgacatcatgaagagacagcccaggaacccgcggacggacaaattg

SEQ ID NO: 1641 - DNA, 60 bp, Artificial Sequence
  Description of Artificial Sequence: targeting sequence/synthetic sequence
aggcgcaagaaggagaatgaactgcccacaactcccgtgaagaaggactcccccaagaac

SEQ ID NO: 1642 - DNA, 60 bp, Artificial Sequence
  Description of Artificial Sequence: targeting sequence/synthetic sequence
tacagatggaacagacaaagcagcacatctgtcattgaaacaaataaaacatcggtggag

SEQ ID NO: 1643 - DNA, 60 bp, Artificial Sequence
  Description of Artificial Sequence: targeting sequence/synthetic sequence
gctgggacaggcccctctagtgcaacagtcaatgtgacaacccgaaagccaccaccaagt

SEQ ID NO: 1644 - DNA, 60 bp, Artificial Sequence
  Description of Artificial Sequence: targeting sequence/synthetic sequence
cgcaaggaaggcaagatgcagagagcccctcgcgacagtgacgctggcagggagggacag

SEQ ID NO: 1645 - DNA, 60 bp, Artificial Sequence
  Description of Artificial Sequence: targeting sequence/synthetic sequence
cctccaggccagaagggccaggccaacgccaccaggattccagcaaaaaccccgcccgct

SEQ ID NO: 1646 - DNA, 60 bp, Artificial Sequence
  Description of Artificial Sequence: targeting sequence/synthetic sequence
aaagacatgatacaaactctaacaaacaaatctaaaatccaaaatgtaggagggacttat

SEQ ID NO: 1647 - DNA, 60 bp, Artificial Sequence
  Description of Artificial Sequence: targeting sequence/synthetic sequence
aagaaagcgctggcagccgctggctatgacgtggagaagaacaacagccgcatcaagctg

SEQ ID NO: 1648 - DNA, 60 bp, Artificial Sequence
  Description of Artificial Sequence: targeting sequence/synthetic sequence
tatgcagtaaaggttgttaaaaaagcagacatgatcaacaaaaatatgactcatcaggtc

SEQ ID NO: 1649 - DNA, 60 bp, Artificial Sequence
  Description of Artificial Sequence: targeting sequence/synthetic sequence
ggcggactggtggaggtgggcggaagcgccaagtacctgaacaataccaagaaataccag

SEQ ID NO: 1650 - DNA, 60 bp, Artificial Sequence
  Description of Artificial Sequence: targeting sequence/synthetic sequence
atacgaacagttggaaatcagacatcaacaaaaatcacgaacttaaaaggcagtgtgctg

SEQ ID NO: 1651 - DNA, 60 bp, Artificial Sequence
  Description of Artificial Sequence: targeting sequence/synthetic sequence
aagagagaagctgctgccaacaccaaccgccccagccctggcgggcacgagaggaaactg

SEQ ID NO: 1652 - DNA, 60 bp, Artificial Sequence
  Description of Artificial Sequence: targeting sequence/synthetic sequence
gtggagaaccagacgcgggctcgggacgatgtgagccgtaagcagctgcggctgtaccag

SEQ ID NO: 1653 - DNA, 60 bp, Artificial Sequence
  Description of Artificial Sequence: targeting sequence/synthetic sequence
ctggcgtacgaggctgccgaaagcgacatcatgaagagacagcccaggaacccgcggacg

SEQ ID NO: 1654 - DNA, 60 bp, Artificial Sequence
  Description of Artificial Sequence: targeting sequence/synthetic sequence
caggcccaaacccccacaggcaagcaaactgacaaaaccaagagtaacatgaaaggtttc

SEQ ID NO: 1655 - DNA, 60 bp, Artificial Sequence
  Description of Artificial Sequence: targeting sequence/synthetic sequence
gtggaggtgggcggaagcgccaagtacctgaacaataccaagaaataccagaaccagagc

SEQ ID NO: 1656 - DNA, 60 bp, Artificial Sequence
  Description of Artificial Sequence: targeting sequence/synthetic sequence
ggtcagcaggcccaaacccccacaggcaagcaaactgacaaaaccaagagtaacatgaaa

SEQ ID NO: 1657 - DNA, 60 bp, Artificial Sequence
  Description of Artificial Sequence: targeting sequence/synthetic sequence
aagaaggccttagcggccggtggctacgacgtggagaagaataacagccgcattaagctg

SEQ ID NO: 1658 - DNA, 60 bp, Artificial Sequence
  Description of Artificial Sequence: targeting sequence/synthetic sequence
gcagtaaaggttgttaaaaaagcagacatgatcaacaaaaatatgactcatcaggtccaa

SEQ ID NO: 1659 - DNA, 60 bp, Artificial Sequence
  Description of Artificial Sequence: targeting sequence/synthetic sequence
gcaaccgctcgcgcaacgacagcctcgcggcttccttcatctgcggtaacacccagggct

SEQ ID NO: 1660 - DNA, 60 bp, Artificial Sequence
  Description of Artificial Sequence: targeting sequence/synthetic sequence
aaactcatgcagaattcaaccaaagcgcctctcaagagatcaaatgttgagaaggtgact

SEQ ID NO: 1661 - DNA, 60 bp, Artificial Sequence
  Description of Artificial Sequence: targeting sequence/synthetic sequence
gcccctccaggccagaagggccaggccaacgccaccaggattccagcaaaaaccccgccc

SEQ ID NO: 1662 - DNA, 60 bp, Artificial Sequence
  Description of Artificial Sequence: targeting sequence/synthetic sequence
attgatcttcctagaaaaaagatctctaatttcactaataagaacatgaaggaggttaag

SEQ ID NO: 1663 - DNA, 60 bp, Artificial Sequence
  Description of Artificial Sequence: targeting sequence/synthetic sequence
gcgggcggcggtcagaagaagggcgacaaggctcccgggggcgggggcgccaatctcaag

SEQ ID NO: 1664 - DNA, 60 bp, Artificial Sequence
  Description of Artificial Sequence: targeting sequence/synthetic sequence
gacaggaaatccaacaccagaaataacatgatccagaccaagccaacaggaacccagcaa

SEQ ID NO: 1665 - DNA, 60 bp, Artificial Sequence
  Description of Artificial Sequence: targeting sequence/synthetic sequence
ctgtccaccaagcagacagaagactactgcctcgcatccaacaaggtgggtcgctgccgg

SEQ ID NO: 1666 - DNA, 60 bp, Artificial Sequence
  Description of Artificial Sequence: targeting sequence/synthetic sequence
aaatccaacaccagaaataacatgatccagaccaagccaacaggaacccagcaatcgacc

SEQ ID NO: 1667 - DNA, 60 bp, Artificial Sequence
  Description of Artificial Sequence: targeting sequence/synthetic sequence
agccagaaccgctccaagacgcccaagaaccaggaagccctgcggatggccaacgtggca

SEQ ID NO: 1668 - DNA, 60 bp, Artificial Sequence
  Description of Artificial Sequence: targeting sequence/synthetic sequence
taccagatcccaccacagcctcgccgagcagcacccaccacaccgcccccaccagtgaag

SEQ ID NO: 1669 - DNA, 60 bp, Artificial Sequence
  Description of Artificial Sequence: targeting sequence/synthetic sequence
aaaaccattattgcacccaaggttaaagatcgaacacacaatgtgactgagaaagtgacc

SEQ ID NO: 1670 - DNA, 60 bp, Artificial Sequence
  Description of Artificial Sequence: targeting sequence/synthetic sequence
attcggaagctgccgttccagcgcctggtgcgagaaatcgcccaagacttcaagaccgat

SEQ ID NO: 1671 - DNA, 60 bp, Artificial Sequence
  Description of Artificial Sequence: targeting sequence/synthetic sequence
accaagcagacagaagactactgcctcgcatccaacaaggtgggtcgctgccggggctct

SEQ ID NO: 1672 - DNA, 60 bp, Artificial Sequence
  Description of Artificial Sequence: targeting sequence/synthetic sequence
cgcatccacgtggagaaccagacgcgggctcgggacgatgtgagccgtaagcagctgcgg

SEQ ID NO: 1673 - DNA, 60 bp, Artificial Sequence
  Description of Artificial Sequence: targeting sequence/synthetic sequence
cagaagggccaggccaacgccaccaggattccagcaaaaaccccgcccgctccaaagaca

SEQ ID NO: 1674 - DNA, 60 bp, Artificial Sequence
  Description of Artificial Sequence: targeting sequence/synthetic sequence
gagctttcgttttcagtgagccaggtggagcgcagtctacgggagggccactacgctcag

SEQ ID NO: 1675 - DNA, 60 bp, Artificial Sequence
  Description of Artificial Sequence: targeting sequence/synthetic sequence
gaaagctgcagcccctctgaagcagatgacacaaaagctttgatacagcccagcaaatgt

SEQ ID NO: 1676 - DNA, 60 bp, Artificial Sequence
  Description of Artificial Sequence: targeting sequence/synthetic sequence
atcccatccccactggatgcagctgtggaatgtcaccgtggagaatgtcaagctgaaggc

SEQ ID NO: 1677 - DNA, 60 bp, Artificial Sequence
  Description of Artificial Sequence: targeting sequence/synthetic sequence
ggcattcctgtcaaagtttctgccacggtgtcttctcctgggtctgttcctgaagtccag

SEQ ID NO: 1678 - DNA, 60 bp, Artificial Sequence
  Description of Artificial Sequence: targeting sequence/synthetic sequence
ttcagagacactcaggccgccatcaagggtcagaaccccagtgccactttcggtgacgtg

SEQ ID NO: 1679 - DNA, 60 bp, Artificial Sequence
  Description of Artificial Sequence: targeting sequence/synthetic sequence
gtgtctggcgtgctgggcatcgaggactactcggtcagccagaccacactggacaatgtg

SEQ ID NO: 1680 - DNA, 60 bp, Artificial Sequence
  Description of Artificial Sequence: targeting sequence/synthetic sequence
acagaccatgtcatcaggagagaaactgagaccaccttctctgggagccactcctgttct

SEQ ID NO: 1681 - DNA, 60 bp, Artificial Sequence
  Description of Artificial Sequence: targeting sequence/synthetic sequence
acgatgccggagaccccaactggggactcagacccgcaacctgctcctaaaaaaatgaaa

SEQ ID NO: 1682 - DNA, 60 bp, Artificial Sequence
  Description of Artificial Sequence: targeting sequence/synthetic sequence
ccggatgggggcctgatgctgcccctgcgggagcccgtcgtcaccctggagggccacacc

SEQ ID NO: 1683 - DNA, 60 bp, Artificial Sequence
  Description of Artificial Sequence: targeting sequence/synthetic sequence
aaatcatccattgtgaaaagaccaagaagtgcagagctgtcagaagatgacctgttgagt

SEQ ID NO: 1684 - DNA, 60 bp, Artificial Sequence
  Description of Artificial Sequence: targeting sequence/synthetic sequence
gcttcgctatctgtaaaagaacctacaaggatagaacttactcctaaaagaacagaattg

SEQ ID NO: 1685 - DNA, 60 bp, Artificial Sequence
  Description of Artificial Sequence: targeting sequence/synthetic sequence
gaattggccaagcacgccgtgtccgagggcaccaaggccgtcaccaagtataccagctcc

SEQ ID NO: 1686 - DNA, 60 bp, Artificial Sequence
  Description of Artificial Sequence: targeting sequence/synthetic sequence
aaaataacagctaataccactgatgaacccaccacacaacccaccacagagcccaccacc

SEQ ID NO: 1687 - DNA, 60 bp, Artificial Sequence
  Description of Artificial Sequence: targeting sequence/synthetic sequence
cacgttgccatggagatgaaagaagacatcaacacaaaaaaagaagacatgatgttccac

SEQ ID NO: 1688 - DNA, 60 bp, Artificial Sequence
  Description of Artificial Sequence: targeting sequence/synthetic sequence
acgctgtccgatgctgacagaaagggaggcaacagcagcgtgaagttggaggctggcctg

SEQ ID NO: 1689 - DNA, 60 bp, Artificial Sequence
  Description of Artificial Sequence: targeting sequence/synthetic sequence
cccgaggccagcaagctgaacaagcgggacggctgcagctccggcggaaccttctgcggc

SEQ ID NO: 1690 - DNA, 60 bp, Artificial Sequence
  Description of Artificial Sequence: targeting sequence/synthetic sequence
caggtgctggtgcctgcgggctctgcccggcctgttgccttctctgtggtgcccacggca

SEQ ID NO: 1691 - DNA, 60 bp, Artificial Sequence
  Description of Artificial Sequence: targeting sequence/synthetic sequence
ggaatgctaccaaagcctcaggaacaagatgaaaaagataatactaaaaggttcttattt

SEQ ID NO: 1692 - DNA, 60 bp, Artificial Sequence
  Description of Artificial Sequence: targeting sequence/synthetic sequence
gtgctgaccgaggaacaccagatcggcaccgtgtgcaagcgggaccagagcgaccggggc

SEQ ID NO: 1693 - DNA, 60 bp, Artificial Sequence
  Description of Artificial Sequence: targeting sequence/synthetic sequence
ggcaccttgccagcggagtatcccctcaaaccaggggaaaaggcccccaaggttcgccgc

SEQ ID NO: 1694 - DNA, 60 bp, Artificial Sequence
  Description of Artificial Sequence: targeting sequence/synthetic sequence
cccggcaaggctggagagcgaggtgttcccggaccccctggcgctgtcggtcctgctggc

SEQ ID NO: 1695 - DNA, 60 bp, Artificial Sequence
  Description of Artificial Sequence: targeting sequence/synthetic sequence
gagagccgcaaactggagaagtcagaagacgaaccacctttgactcttcctaagccttct

SEQ ID NO: 1696 - DNA, 60 bp, Artificial Sequence
  Description of Artificial Sequence: targeting sequence/synthetic sequence
acccagggccgcgcctgcaacaagacggctccccaggccagcggctgtgacctcatgtgc

SEQ ID NO: 1697 - DNA, 60 bp, Artificial Sequence
  Description of Artificial Sequence: targeting sequence/synthetic sequence
gacgccaccaaccggagaatcatgaacgtgcacgaggccgtgaactgcctggagaccctg

SEQ ID NO: 1698 - DNA, 60 bp, Artificial Sequence
  Description of Artificial Sequence: targeting sequence/synthetic sequence
gagaagttgccacccaaaaagaagcgtctgcgacttgcagatatggagcactcctcaggg

SEQ ID NO: 1699 - DNA, 60 bp, Artificial Sequence
  Description of Artificial Sequence: targeting sequence/synthetic sequence
atcagcgtgaccgaccccagcggcaagagcctgctcctggacccccctaccaacgtgcgg

SEQ ID NO: 1700 - DNA, 60 bp, Artificial Sequence
  Description of Artificial Sequence: targeting sequence/synthetic sequence
cagacggggttagcggagcaatgcgcaggaataaggaagcgacctgcaaccgacgattct

SEQ ID NO: 1701 - DNA, 60 bp, Artificial Sequence
  Description of Artificial Sequence: targeting sequence/synthetic sequence
tttctggaggtgcctgaggcccaggaggatgtggaggccacctttccagtccatcagcct

SEQ ID NO: 1702 - DNA, 60 bp, Artificial Sequence
  Description of Artificial Sequence: targeting sequence/synthetic sequence
aatgtaccacatgaagatatctgtgaagactctgatatagatggtgattatagagtgcaa

SEQ ID NO: 1703 - DNA, 60 bp, Artificial Sequence
  Description of Artificial Sequence: targeting sequence/synthetic sequence
atcagcgtgaccgaccccagcggcaagagcctgctcctggacccccctagcaacatccgg

SEQ ID NO: 1704 - DNA, 60 bp, Artificial Sequence
  Description of Artificial Sequence: targeting sequence/synthetic sequence
gctgaggccgagaagcagtacgaagactcctgccgcgtataccaggcatccagccccgat

SEQ ID NO: 1705 - DNA, 60 bp, Artificial Sequence
  Description of Artificial Sequence: targeting sequence/synthetic sequence
tcgccctcacccgtgcccaagagcccctctgtggacaagtacaacgtgagcggcaccaac

SEQ ID NO: 1706 - DNA, 60 bp, Artificial Sequence
  Description of Artificial Sequence: targeting sequence/synthetic sequence
gcagcagcttcagagaccaactgggaatctgtcacaagctctatttcaggggtatcctat

SEQ ID NO: 1707 - DNA, 60 bp, Artificial Sequence
  Description of Artificial Sequence: targeting sequence/synthetic sequence
tgtcggatgcctcctccctgtagtgattcctgtgactttgatgaccccaggctgttgaag

SEQ ID NO: 1708 - DNA, 60 bp, Artificial Sequence
  Description of Artificial Sequence: targeting sequence/synthetic sequence
cctgaggcccaggaggatgtggaggccacctttccagtccatcagcctggcaactacagc

SEQ ID NO: 1709 - DNA, 60 bp, Artificial Sequence
  Description of Artificial Sequence: targeting sequence/synthetic sequence
catgtcatcaggagagaaactgagaccaccttctctgggagccactcctgttctccttct

SEQ ID NO: 1710 - DNA, 60 bp, Artificial Sequence
  Description of Artificial Sequence: targeting sequence/synthetic sequence
tcaggggtatcctataactctccatcagtaacggatcccactctgattgcggatgctctg

SEQ ID NO: 1711 - DNA, 60 bp, Artificial Sequence
  Description of Artificial Sequence: targeting sequence/synthetic sequence
tattcatccacaagggccagttctgtgcccatcatcccttcagtgggtttagaggaaacc

SEQ ID NO: 1712 - DNA, 60 bp, Artificial Sequence
  Description of Artificial Sequence: targeting sequence/synthetic sequence
ctgggcatcgtgaccaacagcaccctgaaggccaccgagatcgaccagctggtgtgccgg

SEQ ID NO: 1713 - DNA, 60 bp, Artificial Sequence
  Description of Artificial Sequence: targeting sequence/synthetic sequence
gaggctgatgctagtgcccctgctacgtgcgctgaaatgcgatgcgaatttggggcacga

SEQ ID NO: 1714 - DNA, 60 bp, Artificial Sequence
  Description of Artificial Sequence: targeting sequence/synthetic sequence
cgggacccctaccacgccaccagcggcgccctgagccccgccaaggactgcggcagccag

SEQ ID NO: 1715 - DNA, 60 bp, Artificial Sequence
  Description of Artificial Sequence: targeting sequence/synthetic sequence
ggggtatcctataactctccatcagtaacggatcccactctgattgcggatgctctggac

SEQ ID NO: 1716 - DNA, 60 bp, Artificial Sequence
  Description of Artificial Sequence: targeting sequence/synthetic sequence
aaggccatcgcgctctgccacaacgtgactcccgtgtatgagtccaacggtgtgactgat

SEQ ID NO: 1717 - DNA, 60 bp, Artificial Sequence
  Description of Artificial Sequence: targeting sequence/synthetic sequence
gccattgacaccatgcttgacatggccgagaatgaaggggtggtggacatcttcaactgc

SEQ ID NO: 1718 - DNA, 60 bp, Artificial Sequence
  Description of Artificial Sequence: targeting sequence/synthetic sequence
ggcgagctggccaagcacgccgtgtccgagggcaccaaggctgtcaccaagtacaccagc

SEQ ID NO: 1719 - DNA, 60 bp, Artificial Sequence
  Description of Artificial Sequence: targeting sequence/synthetic sequence
ttcacctatgaaagcaaacgtatgggcatcatcgtgcgggatgaatcaactggagaaatt

SEQ ID NO: 1720 - DNA, 60 bp, Artificial Sequence
  Description of Artificial Sequence: targeting sequence/synthetic sequence
tccccactggatgcagctgtggaatgtcaccgtggagaatgtcaagctgaaggcgtcctc

SEQ ID NO: 1721 - DNA, 60 bp, Artificial Sequence
  Description of Artificial Sequence: targeting sequence/synthetic sequence
cgttgtgatcaatttctgccgaaaactgattccatcttatcggatccaacagaccacttg

SEQ ID NO: 1722 - DNA, 60 bp, Artificial Sequence
  Description of Artificial Sequence: targeting sequence/synthetic sequence
gaaatcagagctacctcggaggtgtcccctaactccaagccctctcccaacacaaagaac

SEQ ID NO: 1723 - DNA, 60 bp, Artificial Sequence
  Description of Artificial Sequence: targeting sequence/synthetic sequence
agcgtgaccgaccccagcggcaagagcctgctcctggacccccctaccaacatccgggac

SEQ ID NO: 1724 - DNA, 60 bp, Artificial Sequence
  Description of Artificial Sequence: targeting sequence/synthetic sequence
tcgcagtcggaccaactgctggcagaatcttcgtccgcacggccccagctggagttgcac

SEQ ID NO: 1725 - DNA, 60 bp, Artificial Sequence
  Description of Artificial Sequence: targeting sequence/synthetic sequence
ggggccaacggtgctcccggcaacgatggtgctaagggtgatgctggtgcccctggagct

SEQ ID NO: 1726 - DNA, 60 bp, Artificial Sequence
  Description of Artificial Sequence: targeting sequence/synthetic sequence
gaagacaccaatctgtgcgctattcacgctaaacgcgtcaccatcatgcccaaagatatc

SEQ ID NO: 1727 - DNA, 60 bp, Artificial Sequence
  Description of Artificial Sequence: targeting sequence/synthetic sequence
cgggaactgattgatcagtatgatgtccagagggatgacagcagcgatggctctttggaa

SEQ ID NO: 1728 - DNA, 60 bp, Artificial Sequence
  Description of Artificial Sequence: targeting sequence/synthetic sequence
cggtccgtcgtgtcctttgataaggtcaaggagcctcggaagtcaagagactcagagtcc

SEQ ID NO: 1729 - DNA, 60 bp, Artificial Sequence
  Description of Artificial Sequence: targeting sequence/synthetic sequence
gattgtatgaagcacttcaagggctcggtggagaagctgtgtagtgtggagcaggacctg

SEQ ID NO: 1730 - DNA, 60 bp, Artificial Sequence
  Description of Artificial Sequence: targeting sequence/synthetic sequence
gtccgtggtctgaccggccccattggtcctcctggccctgctggtgcccctggtgacaag

SEQ ID NO: 1731 - DNA, 60 bp, Artificial Sequence
  Description of Artificial Sequence: targeting sequence/synthetic sequence
cagccttctactagtcgaaagcggccccgtgaaggggaagccgagggtgccgagaccaca

SEQ ID NO: 1732 - DNA, 60 bp, Artificial Sequence
  Description of Artificial Sequence: targeting sequence/synthetic sequence
gagaccatcaaaaactgcctgtcagcggcggaggacaagaagctaaagtccgtcgcgttc

SEQ ID NO: 1733 - DNA, 60 bp, Artificial Sequence
  Description of Artificial Sequence: targeting sequence/synthetic sequence
ccagacgtgactgaacgctgctcagatggctggagctttgatgctaccaccctggatgac

SEQ ID NO: 1734 - DNA, 60 bp, Artificial Sequence
  Description of Artificial Sequence: targeting sequence/synthetic sequence
cagctggtgtgccgggacaagctgagctccaccagccagctgaagagcgtgggcctgaac

SEQ ID NO: 1735 - DNA, 60 bp, Artificial Sequence
  Description of Artificial Sequence: targeting sequence/synthetic sequence
tgctgtgagtctgcctctgaagattgcatggccaaagagctgcctgaacacacagtaaaa

SEQ ID NO: 1736 - DNA, 60 bp, Artificial Sequence
  Description of Artificial Sequence: targeting sequence/synthetic sequence
caaggtccctctggagcctctggtcctgctggtccccgaggtccccctggctctgctggt

SEQ ID NO: 1737 - DNA, 60 bp, Artificial Sequence
  Description of Artificial Sequence: targeting sequence/synthetic sequence
agcaacacccagcggagctccgagttcaagatcgtggccagcgacagcaccgagagcaag

SEQ ID NO: 1738 - DNA, 60 bp, Artificial Sequence
  Description of Artificial Sequence: targeting sequence/synthetic sequence
ataacagctaataccactgatgaacccaccacacaacccaccacagagcccaccacccaa

SEQ ID NO: 1739 - DNA, 60 bp, Artificial Sequence
  Description of Artificial Sequence: targeting sequence/synthetic sequence
ccgtcgcagtcggaccaactgctggcagaatcttcgtccgcacggccccagctggagttg

SEQ ID NO: 1740 - DNA, 60 bp, Artificial Sequence
  Description of Artificial Sequence: targeting sequence/synthetic sequence
gagctggccaagcacgcggtgtcggagggcaccaaggccgtcaccaagtacaccagctcc

SEQ ID NO: 1741 - DNA, 60 bp, Artificial Sequence
  Description of Artificial Sequence: targeting sequence/synthetic sequence
gaaatgagacaaaagaagttagaaaaggtgatggaagaagaaggcctaaaagatgaggag

SEQ ID NO: 1742 - DNA, 60 bp, Artificial Sequence
  Description of Artificial Sequence: targeting sequence/synthetic sequence
aacgcccagcggagctccgagttcaagatcgtggccagcgacagcaccgagagcaagagc

SEQ ID NO: 1743 - DNA, 60 bp, Artificial Sequence
  Description of Artificial Sequence: targeting sequence/synthetic sequence
ggtattccaggtgttccaggagctaaaggcgaagatggcaaggatggatcacctggagaa

SEQ ID NO: 1744 - DNA, 60 bp, Artificial Sequence
  Description of Artificial Sequence: targeting sequence/synthetic sequence
ggggtcacagaggaggcacccctgaagctctccaaggccgtgcataaggctgtgctgacc

SEQ ID NO: 1745 - DNA, 60 bp, Artificial Sequence
  Description of Artificial Sequence: targeting sequence/synthetic sequence
atcagccagagcaagctgatcgcccggacccagggcatcgaggacctgatcgacaccgcc

SEQ ID NO: 1746 - DNA, 60 bp, Artificial Sequence
  Description of Artificial Sequence: targeting sequence/synthetic sequence
aacatcagcgtgaccgaccccagcggcaagagcctgctcctggacccccctagcaacatc

SEQ ID NO: 1747 - DNA, 60 bp, Artificial Sequence
  Description of Artificial Sequence: targeting sequence/synthetic sequence
ggggagctggccaagcacgccgtgtcggagggcaccaaggccgtcaccaagtacaccagt

SEQ ID NO: 1748 - DNA, 60 bp, Artificial Sequence
  Description of Artificial Sequence: targeting sequence/synthetic sequence
ggccgggtggccgacaccgtgggcaccggccccaccaacagcgaggccatccccgccctg

SEQ ID NO: 1749 - DNA, 60 bp, Artificial Sequence
  Description of Artificial Sequence: targeting sequence/synthetic sequence
ggttcagaagcgaacctcacgtgcacactgaccggcctgagagatgcctctggtgccacc

SEQ ID NO: 1750 - DNA, 60 bp, Artificial Sequence
  Description of Artificial Sequence: targeting sequence/synthetic sequence
ttttcaggcccgcactgtgagaagggtttagttgaaaagagtgcaggggatgttgatacg

SEQ ID NO: 1751 - DNA, 60 bp, Artificial Sequence
  Description of Artificial Sequence: targeting sequence/synthetic sequence
ccaggggagctggccaagcacgcggtgtcggagggcaccaaggccgtcaccaagtacacc

SEQ ID NO: 1752 - DNA, 60 bp, Artificial Sequence
  Description of Artificial Sequence: targeting sequence/synthetic sequence
gtcgtgtcctttgataaggtcaaggagcctcggaagtcaagagactcagagtcccatagc

SEQ ID NO: 1753 - DNA, 60 bp, Artificial Sequence
  Description of Artificial Sequence: targeting sequence/synthetic sequence
aaatgctgtgagtctgcctctgaagattgcatggccaaagagctgcctgaacacacagta

SEQ ID NO: 1754 - DNA, 60 bp, Artificial Sequence
  Description of Artificial Sequence: targeting sequence/synthetic sequence
ggccgagtcggtcctcctggcccctctggaaatgctggaccccctggccctcctggtcct

SEQ ID NO: 1755 - DNA, 60 bp, Artificial Sequence
  Description of Artificial Sequence: targeting sequence/synthetic sequence
ctgcatctagcagatgattgtatgaagcacttcaagggctcggtggagaagctgtgtagt

SEQ ID NO: 1756 - DNA, 60 bp, Artificial Sequence
  Description of Artificial Sequence: targeting sequence/synthetic sequence
agcgcacccctggaggctcctgagcctcggaagccggtgacagcccaggagcgccagcgg

SEQ ID NO: 1757 - DNA, 60 bp, Artificial Sequence
  Description of Artificial Sequence: targeting sequence/synthetic sequence
tccgtcgtgtcctttgataaggtcaaggagcctcggaagtcaagagactcagagtcccat

SEQ ID NO: 1758 - DNA, 60 bp, Artificial Sequence
  Description of Artificial Sequence: targeting sequence/synthetic sequence
gattgcaaccgcaaacggaaaggcagctccactgactaccaagaaagcatggacacagac

SEQ ID NO: 1759 - DNA, 60 bp, Artificial Sequence
  Description of Artificial Sequence: targeting sequence/synthetic sequence
gtgctggtgcctgcgggctctgcccggcctgttgccttctctgtggtgcccacggcagcc

SEQ ID NO: 1760 - DNA, 60 bp, Artificial Sequence
  Description of Artificial Sequence: targeting sequence/synthetic sequence
actccactggcagccacagaggcacagacaactcgactgacggccacggaggcacagacc

SEQ ID NO: 1761 - DNA, 60 bp, Artificial Sequence
  Description of Artificial Sequence: targeting sequence/synthetic sequence
gatatctggggccaagggacaatggtcaccgtctcttcagcctccaccaagggcccatcg

SEQ ID NO: 1762 - DNA, 60 bp, Artificial Sequence
  Description of Artificial Sequence: targeting sequence/synthetic sequence
cccagcgcacccctggaggctcctgagcctcggaagccggtgacagcccaggagcgccag

SEQ ID NO: 1763 - DNA, 60 bp, Artificial Sequence
  Description of Artificial Sequence: targeting sequence/synthetic sequence
atccacacagctgaaatcagagctacctcggaggtgtcccctaactccaagccctctccc

SEQ ID NO: 1764 - DNA, 60 bp, Artificial Sequence
  Description of Artificial Sequence: targeting sequence/synthetic sequence
acgggcaccttgccagcggagtatcccctcaaaccaggggaaaaggcccccaaggttcgc

SEQ ID NO: 1765 - DNA, 60 bp, Artificial Sequence
  Description of Artificial Sequence: targeting sequence/synthetic sequence
ccggagaccccaactggggactcagacccgcaacctgctcctaaaaaaatgaaaacatct

SEQ ID NO: 1766 - DNA, 60 bp, Artificial Sequence
  Description of Artificial Sequence: targeting sequence/synthetic sequence
cctgggcccagtggcgaatcccgaggacactcagccactcagctgccagcggaaaaaact

SEQ ID NO: 1767 - DNA, 60 bp, Artificial Sequence
  Description of Artificial Sequence: targeting sequence/synthetic sequence
gaggcacccctgaagctctccaaggccgtgcataaggctgtgctgaccatcgacgagaaa

SEQ ID NO: 1768 - DNA, 60 bp, Artificial Sequence
  Description of Artificial Sequence: targeting sequence/synthetic sequence
cccgctgaggtcacgaccacggtgctggtgaggagagatcaccatggagccaatttctcg

SEQ ID NO: 1769 - DNA, 60 bp, Artificial Sequence
  Description of Artificial Sequence: targeting sequence/synthetic sequence
ccagcccagagagatggaggtgccctcgggcggggcccctgggactcctctgatcgatct

SEQ ID NO: 1770 - DNA, 60 bp, Artificial Sequence
  Description of Artificial Sequence: targeting sequence/synthetic sequence
gagcctcccgtcaagaagctcatgcggacatccacgccgccgcccgccagcgtcatcaac

SEQ ID NO: 1771 - DNA, 60 bp, Artificial Sequence
  Description of Artificial Sequence: targeting sequence/synthetic sequence
ctggaccggcaagatcctccctctgtggtggtcaccagccaccaggccccaggagaaaag

SEQ ID NO: 1772 - DNA, 60 bp, Artificial Sequence
  Description of Artificial Sequence: targeting sequence/synthetic sequence
gtggtatacgcaaaatgtgattccagtccagactcagccgaggacgtgcgcaaggtgtgc

SEQ ID NO: 1773 - DNA, 60 bp, Artificial Sequence
  Description of Artificial Sequence: targeting sequence/synthetic sequence
cccaaatcttgtgacacacctcccccatgcccacggtgcccagcacctgaactcctggga

SEQ ID NO: 1774 - DNA, 60 bp, Artificial Sequence
  Description of Artificial Sequence: targeting sequence/synthetic sequence
atccccgtccgtgcgccccggagcccgcgcgccccagagcctgcgctggaaccggagtcc

SEQ ID NO: 1775 - DNA, 60 bp, Artificial Sequence
  Description of Artificial Sequence: targeting sequence/synthetic sequence
cttatgatttcccggacccctgaggtcacgtgcgtggtggtggacgtgagccacgaagac

SEQ ID NO: 1776 - DNA, 60 bp, Artificial Sequence
  Description of Artificial Sequence: targeting sequence/synthetic sequence
gtgcacgatggcagcttggcccccgaccacctggagggccgggtggactttgagaatgtg

SEQ ID NO: 1777 - DNA, 60 bp, Artificial Sequence
  Description of Artificial Sequence: targeting sequence/synthetic sequence
accccatctccctcaactccacctaccccatctccctcatgctgccacccccgactgtca

SEQ ID NO: 1778 - DNA, 60 bp, Artificial Sequence
  Description of Artificial Sequence: targeting sequence/synthetic sequence
catgggttggcttcctccaatgaaacctttgatgggctggactgtccagctgcagggagg

SEQ ID NO: 1779 - DNA, 60 bp, Artificial Sequence
  Description of Artificial Sequence: targeting sequence/synthetic sequence
ggaccaggagaagatgggctgaatccgtttttagaggtcaaggtaacagacacaccaaaa

SEQ ID NO: 1780 - DNA, 60 bp, Artificial Sequence
  Description of Artificial Sequence: targeting sequence/synthetic sequence
ttcggcacccagacctacacctgcaacgtagatcacaagcccagcaacaccaaggtggac

SEQ ID NO: 1781 - DNA, 60 bp, Artificial Sequence
  Description of Artificial Sequence: targeting sequence/synthetic sequence
cgttaccagaacctgtctccagtgggctctggcgcctatggctctgtgtgtgctgctttt

SEQ ID NO: 1782 - DNA, 60 bp, Artificial Sequence
  Description of Artificial Sequence: targeting sequence/synthetic sequence
cagcaataccagagctccaacacccagcggagctccgagttcaagatcgtggccagcgac

SEQ ID NO: 1783 - DNA, 60 bp, Artificial Sequence
  Description of Artificial Sequence: targeting sequence/synthetic sequence
ttcaggtctgccctggagagcagcccagacccggccacactcagtaaagaggacgcgcgc

SEQ ID NO: 1784 - DNA, 60 bp, Artificial Sequence
  Description of Artificial Sequence: targeting sequence/synthetic sequence
cctcaaggccccaagggagatccaggccctcctggtattcctgggagaaatggtgaccct

SEQ ID NO: 1785 - DNA, 60 bp, Artificial Sequence
  Description of Artificial Sequence: targeting sequence/synthetic sequence
gagctggccaagcacgctgtgtcagagggcaccaaggccgttaccaagtacaccagctcc

SEQ ID NO: 1786 - DNA, 60 bp, Artificial Sequence
  Description of Artificial Sequence: targeting sequence/synthetic sequence
ctggccgagagccggaccacactgaacaagcggaacgacatcgagaagcggatcgagtgc

SEQ ID NO: 1787 - DNA, 60 bp, Artificial Sequence
  Description of Artificial Sequence: targeting sequence/synthetic sequence
gctaatgacaccggctttgtggacatccctaagcaggagaaggccctgatgaaggcagtt

SEQ ID NO: 1788 - DNA, 60 bp, Artificial Sequence
  Description of Artificial Sequence: targeting sequence/synthetic sequence
agttaccgcctggccgagcagcagccgttactgcggcacccggcgccccccggcccggga

SEQ ID NO: 1789 - DNA, 60 bp, Artificial Sequence
  Description of Artificial Sequence: targeting sequence/synthetic sequence
atcccggatgggggcctgatgctgcccctgcgggagcccgtcgtcaccctggagggccac

SEQ ID NO: 1790 - DNA, 60 bp, Artificial Sequence
  Description of Artificial Sequence: targeting sequence/synthetic sequence
ttatctaaaccagaagttgaatatgattgtgatgctcccagtcacaactcagaaaaaaag

SEQ ID NO: 1791 - DNA, 60 bp, Artificial Sequence
  Description of Artificial Sequence: targeting sequence/synthetic sequence
agtatttttgatgggttggtggaagaagatgacaaggacaaagcgaaaagagtatctaga

SEQ ID NO: 1792 - DNA, 60 bp, Artificial Sequence
  Description of Artificial Sequence: targeting sequence/synthetic sequence
ccagatacagctgtcgcccctgggccaccacctggcccccctcgagtttccccagaccct

SEQ ID NO: 1793 - DNA, 60 bp, Artificial Sequence
  Description of Artificial Sequence: targeting sequence/synthetic sequence
gccactgcctccgccatggctggaccttcctctgagacgacctctgaggaacagctgatc

SEQ ID NO: 1794 - DNA, 60 bp, Artificial Sequence
  Description of Artificial Sequence: targeting sequence/synthetic sequence
cctgcgggctctgcccggcctgttgccttctctgtggtgcccacggcagccgccgctgtg

SEQ ID NO: 1795 - DNA, 60 bp, Artificial Sequence
  Description of Artificial Sequence: targeting sequence/synthetic sequence
agagacactcaggccgccatcaagggtcagaaccccagtgccactttcggtgacgtgtcc

SEQ ID NO: 1796 - DNA, 60 bp, Artificial Sequence
  Description of Artificial Sequence: targeting sequence/synthetic sequence
aacctgtcactggatgagctgccgccggccctgagacaggacaacttctcgctgcccagt

SEQ ID NO: 1797 - DNA, 60 bp, Artificial Sequence
  Description of Artificial Sequence: targeting sequence/synthetic sequence
acaaccacttctggtggttgccactcacctgaggatacacccaaggacaatgctgctact

SEQ ID NO: 1798 - DNA, 60 bp, Artificial Sequence
  Description of Artificial Sequence: targeting sequence/synthetic sequence
gtatacgcaaaatgtgattccagtccagactcagccgaggacgtgcgcaaggtgtgccaa

SEQ ID NO: 1799 - DNA, 60 bp, Artificial Sequence
  Description of Artificial Sequence: targeting sequence/synthetic sequence
gattctcctacccagcccactactgggtccttctgcccaggacctgttactctctgctct

SEQ ID NO: 1800 - DNA, 60 bp, Artificial Sequence
  Description of Artificial Sequence: targeting sequence/synthetic sequence
gatgggggcctgatgctgcccctgcgggagcccgtcgtcaccctggagggccacaccaag

SEQ ID NO: 1801 - DNA, 60 bp, Artificial Sequence
  Description of Artificial Sequence: targeting sequence/synthetic sequence
cctggtcccgaaggaggaaagggtgctgctggtcctcctgggccacctggtgctgctggt

SEQ ID NO: 1802 - DNA, 60 bp, Artificial Sequence
  Description of Artificial Sequence: targeting sequence/synthetic sequence
gggcccagtggcgaatcccgaggacactcagccactcagctgccagcggaaaaaactgtc

SEQ ID NO: 1803 - DNA, 60 bp, Artificial Sequence
  Description of Artificial Sequence: targeting sequence/synthetic sequence
cgggccatcgcccgggtggccgacaccatgcccagcggccccaccaacagcgaggccgtg

SEQ ID NO: 1804 - DNA, 60 bp, Artificial Sequence
  Description of Artificial Sequence: targeting sequence/synthetic sequence
gttgaatatgattgtgatgctcccagtcacaactcagaaaaaaagaaaactgaaggcctt

SEQ ID NO: 1805 - DNA, 60 bp, Artificial Sequence
  Description of Artificial Sequence: targeting sequence/synthetic sequence
gccggcgtggccatcgccaagaccatccggctggagagcgaggtgaccgccatcaagaac

SEQ ID NO: 1806 - DNA, 60 bp, Artificial Sequence
  Description of Artificial Sequence: targeting sequence/synthetic sequence
ctcctagatgaggatggtaagaagactttctttcgggggctggagagtcagaccaagctg

SEQ ID NO: 1807 - DNA, 60 bp, Artificial Sequence
  Description of Artificial Sequence: targeting sequence/synthetic sequence
gctgcaggggtcctctgtgaacttgctcaggacaaggaagctgcagaagctattgaagct

SEQ ID NO: 1808 - DNA, 60 bp, Artificial Sequence
  Description of Artificial Sequence: targeting sequence/synthetic sequence
gtccacgacttcccaggcaaaaaactagtgctgtccagtgagaagactgtgctgacccct

SEQ ID NO: 1809 - DNA, 60 bp, Artificial Sequence
  Description of Artificial Sequence: targeting sequence/synthetic sequence
tccgtggtatacgcaaaatgtgattccagtccagactcagccgaggacgtgcgcaaggtg

SEQ ID NO: 1810 - DNA, 60 bp, Artificial Sequence
  Description of Artificial Sequence: targeting sequence/synthetic sequence
tgcagcccctctgaagcagatgacacaaaagctttgatacagcccagcaaatgttctccc

SEQ ID NO: 1811 - DNA, 60 bp, Artificial Sequence
  Description of Artificial Sequence: targeting sequence/synthetic sequence
gagagcagcccagcagacccggccacgctcagtgaggacgaagcgcgcctcctgctggct

SEQ ID NO: 1812 - DNA, 60 bp, Artificial Sequence
  Description of Artificial Sequence: targeting sequence/synthetic sequence
ggctcccccggattccagggtctccctggtcctgctggtcctccaggtgaagcaggcaaa

SEQ ID NO: 1813 - DNA, 60 bp, Artificial Sequence
  Description of Artificial Sequence: targeting sequence/synthetic sequence
gagtacaagtgcaaggtctccaacaaaggcctcccagcccccatcgagaaaaccatctcc

SEQ ID NO: 1814 - DNA, 60 bp, Artificial Sequence
  Description of Artificial Sequence: targeting sequence/synthetic sequence
gtggtgcagcctagtgttggtgctgctgctgggccagtggttcctccatgtccggggagg

SEQ ID NO: 1815 - DNA, 60 bp, Artificial Sequence
  Description of Artificial Sequence: targeting sequence/synthetic sequence
gttgccatggagatgaaagaagacatcaacacaaaaaaagaagacatgatgttccacaag

SEQ ID NO: 1816 - DNA, 60 bp, Artificial Sequence
  Description of Artificial Sequence: targeting sequence/synthetic sequence
aggaagattgctgtggctgcagcgtccaagccagcagtggagatcaaacaggagggagac

SEQ ID NO: 1817 - DNA, 60 bp, Artificial Sequence
  Description of Artificial Sequence: targeting sequence/synthetic sequence
gctccttcgactcatcccactagtgcctcggtcactgttaccacgccgggtctgttactt

SEQ ID NO: 1818 - DNA, 60 bp, Artificial Sequence
  Description of Artificial Sequence: targeting sequence/synthetic sequence
atcatcaaaggggagcccgggctccctggtcctgagggccccccagggctgaaagggctt

SEQ ID NO: 1819 - DNA, 60 bp, Artificial Sequence
  Description of Artificial Sequence: targeting sequence/synthetic sequence
caggtgttcagcaagatggagcaggtgtctggcgtgctgggcatcgaggactactcggtc

SEQ ID NO: 1820 - DNA, 60 bp, Artificial Sequence
  Description of Artificial Sequence: targeting sequence/synthetic sequence
aaccctgagacaaccacttctggtggttgccactcacctgaggatacacccaaggacaat

SEQ ID NO: 1821 - DNA, 60 bp, Artificial Sequence
  Description of Artificial Sequence: targeting sequence/synthetic sequence
cagcacaagagccaccggcagatggtgaccacaaccaaccccctgatccggcacgagaac

SEQ ID NO: 1822 - DNA, 60 bp, Artificial Sequence
  Description of Artificial Sequence: targeting sequence/synthetic sequence
gctgcagagtccaacagggagcgcggccagggccaggagcccgtgggatcgcaggagcat

SEQ ID NO: 1823 - DNA, 60 bp, Artificial Sequence
  Description of Artificial Sequence: targeting sequence/synthetic sequence
cacatcagccagagcaagctgatcgcccggacccagggcatcgaggacctgatcgacacc

SEQ ID NO: 1824 - DNA, 60 bp, Artificial Sequence
  Description of Artificial Sequence: targeting sequence/synthetic sequence
cagggggttgaggattcagcaaatgaagattcagtggatgctaagccagaccggtcctcg

SEQ ID NO: 1825 - DNA, 60 bp, Artificial Sequence
  Description of Artificial Sequence: targeting sequence/synthetic sequence
ttccagcgcgccatgcacgactacaaccaggccgagatgaagcagcgcgacaactgcaag

SEQ ID NO: 1826 - DNA, 60 bp, Artificial Sequence
  Description of Artificial Sequence: targeting sequence/synthetic sequence
accactgatgaacccaccacacaacccaccacagagcccaccacccaacccaccatccaa

SEQ ID NO: 1827 - DNA, 60 bp, Artificial Sequence
  Description of Artificial Sequence: targeting sequence/synthetic sequence
aagggacaagaactatgtgcagattattcagaaaatacatttactgagtacaagaaaaaa

SEQ ID NO: 1828 - DNA, 60 bp, Artificial Sequence
  Description of Artificial Sequence: targeting sequence/synthetic sequence
ctgtctccctttcaggatgctgcctcctcttcttcctcttcttcctcctccgctaccacc

SEQ ID NO: 1829 - DNA, 60 bp, Artificial Sequence
  Description of Artificial Sequence: targeting sequence/synthetic sequence
gaagagaccatcaaaaactgcctgtcagcggcggaggacaagaagctaaagtccgtcgcg

SEQ ID NO: 1830 - DNA, 60 bp, Artificial Sequence
  Description of Artificial Sequence: targeting sequence/synthetic sequence
gtcacagaggaggcacccctgaagctctccaaggccgtgcataaggctgtgctgaccatc

SEQ ID NO: 1831 - DNA, 60 bp, Artificial Sequence
  Description of Artificial Sequence: targeting sequence/synthetic sequence
ctgcccgaggaacaggaccagaactacgtgtgcaagcacacctacgtggaccggggctgg

SEQ ID NO: 1832 - DNA, 60 bp, Artificial Sequence
  Description of Artificial Sequence: targeting sequence/synthetic sequence
aacactgctgcccctgctacagtcccgtctaccacggccccgttcttcagtagcagcacg

SEQ ID NO: 1833 - DNA, 60 bp, Artificial Sequence
  Description of Artificial Sequence: targeting sequence/synthetic sequence
atgaaaagcgtcattccatccgatggtcccagtgttgcttgtgtgaagaaagcctcctac

SEQ ID NO: 1834 - DNA, 60 bp, Artificial Sequence
  Description of Artificial Sequence: targeting sequence/synthetic sequence
acacctgttattccaactgcgcctacaagcaaaccatcttctgctggtggagaacttctt

SEQ ID NO: 1835 - DNA, 60 bp, Artificial Sequence
  Description of Artificial Sequence: targeting sequence/synthetic sequence
cgcctggccgagcagcagccgttactgcggcacccggcgccccccggcccgggacccgga

SEQ ID NO: 1836 - DNA, 60 bp, Artificial Sequence
  Description of Artificial Sequence: targeting sequence/synthetic sequence
gctcctggtgcccctggccccgttggccctgctggcaagagtggtgatcgtggtgagact

SEQ ID NO: 1837 - DNA, 60 bp, Artificial Sequence
  Description of Artificial Sequence: targeting sequence/synthetic sequence
gatgaagaacccttacagttcagggttcctggaacttctaccagtgccactctgacaggc

SEQ ID NO: 1838 - DNA, 60 bp, Artificial Sequence
  Description of Artificial Sequence: targeting sequence/synthetic sequence
gtgtacaccctgcccccatcccaggaggagatgaccaagaaccaggtcagcctgacctgc

SEQ ID NO: 1839 - DNA, 60 bp, Artificial Sequence
  Description of Artificial Sequence: targeting sequence/synthetic sequence
gtcaagaagctcatgcggacatccacgccgccgcccgccagcgtcatcaacaacatgctg

SEQ ID NO: 1840 - DNA, 60 bp, Artificial Sequence
  Description of Artificial Sequence: targeting sequence/synthetic sequence
ttcgtgcccagtgctgacgggaaagcctgtgaagatattgatgagtgctcccttccgaac

SEQ ID NO: 1841 - DNA, 60 bp, Artificial Sequence
  Description of Artificial Sequence: targeting sequence/synthetic sequence
ctagccggcaagtccgtgacatgccacgtgaagcactacacgaatcccagccaggatgtg

SEQ ID NO: 1842 - DNA, 60 bp, Artificial Sequence
  Description of Artificial Sequence: targeting sequence/synthetic sequence
cgagtcggtcctcctggcccctctggaaatgctggaccccctggccctcctggtcctgct

SEQ ID NO: 1843 - DNA, 60 bp, Artificial Sequence
  Description of Artificial Sequence: targeting sequence/synthetic sequence
ctgaaaagagatatcccttggccagaaggtgaagaaaagttatctgataatgctcaaagt

SEQ ID NO: 1844 - DNA, 60 bp, Artificial Sequence
  Description of Artificial Sequence: targeting sequence/synthetic sequence
aaatcttgtgacaaaactcacacatgcccaccgtgcccagcacctgaactcctgggggga

SEQ ID NO: 1845 - DNA, 60 bp, Artificial Sequence
  Description of Artificial Sequence: targeting sequence/synthetic sequence
aggtgcgagcacccacctcctggtcccgtgtgtggatccgacggtgtcacttatggtagc

SEQ ID NO: 1846 - DNA, 60 bp, Artificial Sequence
  Description of Artificial Sequence: targeting sequence/synthetic sequence
gtgacaacaacagctggaggaacggcagaggtggcacccgacgcggtgcccaggagtgga

SEQ ID NO: 1847 - DNA, 60 bp, Artificial Sequence
  Description of Artificial Sequence: targeting sequence/synthetic sequence
cgggtggccgacaccatgcccagcggccccaccaacagcgaggccgtgcccgccctgacc

SEQ ID NO: 1848 - DNA, 60 bp, Artificial Sequence
  Description of Artificial Sequence: targeting sequence/synthetic sequence
gccctggagagcagcccagacccggccacactcagtaaagaggacgcgcgcctcctgctg

SEQ ID NO: 1849 - DNA, 60 bp, Artificial Sequence
  Description of Artificial Sequence: targeting sequence/synthetic sequence
gacttctttagctcccaccccctgcgggagcccgtgaacgccaccgaggaccccagctcc

SEQ ID NO: 1850 - DNA, 60 bp, Artificial Sequence
  Description of Artificial Sequence: targeting sequence/synthetic sequence
gacatcaacacaaaaaaagaagacatgatgttccacaagatctacatacagaagcatgac

SEQ ID NO: 1851 - DNA, 60 bp, Artificial Sequence
  Description of Artificial Sequence: targeting sequence/synthetic sequence
gccaggcactttgagtctcagtctgatgacccacacttccatgagaagaagcagatcccc

SEQ ID NO: 1852 - DNA, 60 bp, Artificial Sequence
  Description of Artificial Sequence: targeting sequence/synthetic sequence
tgcctggctgttgggatggtcaaagaagtggttcgcacagacagtttaaaaggccggaga

SEQ ID NO: 1853 - DNA, 60 bp, Artificial Sequence
  Description of Artificial Sequence: targeting sequence/synthetic sequence
ggtgatcttgaccagaataccatcgagaccatgcggaagccacgctgcggcaacccagat

SEQ ID NO: 1854 - DNA, 60 bp, Artificial Sequence
  Description of Artificial Sequence: targeting sequence/synthetic sequence
gagcagcagccgttactgcggcacccggcgccccccggcccgggacccggacccgggccc

SEQ ID NO: 1855 - DNA, 60 bp, Artificial Sequence
  Description of Artificial Sequence: targeting sequence/synthetic sequence
tgggtgtcgtctgaggcatacacttcacctgtctctagggctcaatctgaaagtgaggtt

SEQ ID NO: 1856 - DNA, 60 bp, Artificial Sequence
  Description of Artificial Sequence: targeting sequence/synthetic sequence
cacgctggcaatctggcccggtgctcggagctgacccagtcgcaggcatcgctgcagtcg

SEQ ID NO: 1857 - DNA, 60 bp, Artificial Sequence
  Description of Artificial Sequence: targeting sequence/synthetic sequence
ggaccccctggccccattggtaatgttggtgctcctggagccaaaggtgctcgcggcagc

SEQ ID NO: 1858 - DNA, 60 bp, Artificial Sequence
  Description of Artificial Sequence: targeting sequence/synthetic sequence
gagctgacgggcaccttgccagcggagtatcccctcaaaccaggggaaaaggcccccaag

SEQ ID NO: 1859 - DNA, 60 bp, Artificial Sequence
  Description of Artificial Sequence: targeting sequence/synthetic sequence
aaagaagacatcaacacaaaaaaagaagacatgatgttccacaagatctacatacagaag

SEQ ID NO: 1860 - DNA, 60 bp, Artificial Sequence
  Description of Artificial Sequence: targeting sequence/synthetic sequence
tacatggacgtctggggcaaagggaccacggtcaccgtctcctcagcatccccgaccagc

SEQ ID NO: 1861 - DNA, 60 bp, Artificial Sequence
  Description of Artificial Sequence: targeting sequence/synthetic sequence
acctctgaggccccgtccacccaggacccctccacccaggcctccactgcgtcctcccca

SEQ ID NO: 1862 - DNA, 60 bp, Artificial Sequence
  Description of Artificial Sequence: targeting sequence/synthetic sequence
atggtgcacgatggcagcttggcccccgaccacctggagggccgggtggactttgagaat

SEQ ID NO: 1863 - DNA, 60 bp, Artificial Sequence
  Description of Artificial Sequence: targeting sequence/synthetic sequence
ttgggcaacaagaacaactaccttcgggaagaagagtgcattctagcctgtcggggtgtg

SEQ ID NO: 1864 - DNA, 60 bp, Artificial Sequence
  Description of Artificial Sequence: targeting sequence/synthetic sequence
tgtgacaaaactcacacatgcccaccgtgcccagcacctgaactcctggggggaccgtca

SEQ ID NO: 1865 - DNA, 60 bp, Artificial Sequence
  Description of Artificial Sequence: targeting sequence/synthetic sequence
gaactgattgatcagtatgatgtccagagggatgacagcagcgatggctctttggaagat

SEQ ID NO: 1866 - DNA, 60 bp, Artificial Sequence
  Description of Artificial Sequence: targeting sequence/synthetic sequence
gttgtctgcgtggacaaactcaccaaggtctacaaggacgacaagaagctggccctgaac

SEQ ID NO: 1867 - DNA, 60 bp, Artificial Sequence
  Description of Artificial Sequence: targeting sequence/synthetic sequence
ggtcctcctggccctcctgggattaatggtagtcctggtggtaaaggcgaaatgggtccc

SEQ ID NO: 1868 - DNA, 60 bp, Artificial Sequence
  Description of Artificial Sequence: targeting sequence/synthetic sequence
tcccctccagatgcggcctcagctgctccactccgaacaatcactgctgacactttccgc

SEQ ID NO: 1869 - DNA, 60 bp, Artificial Sequence
  Description of Artificial Sequence: targeting sequence/synthetic sequence
cagccacaggaattccctacctacgtggaacccacaaatgatgaaatctgtgaggcgttc

SEQ ID NO: 1870 - DNA, 60 bp, Artificial Sequence
  Description of Artificial Sequence: targeting sequence/synthetic sequence
tggcagacagaagaaaaaacttgcgacttggtaggagaaaagggtaaagagtcagagaaa

SEQ ID NO: 1871 - DNA, 60 bp, Artificial Sequence
  Description of Artificial Sequence: targeting sequence/synthetic sequence
cctgctggctcccccggattccagggtctccctggtcctgctggtcctccaggtgaagca

SEQ ID NO: 1872 - DNA, 60 bp, Artificial Sequence
  Description of Artificial Sequence: targeting sequence/synthetic sequence
ctaatggccactgcctccgccatggctggaccttcctctgagacgacctctgaggaacag

SEQ ID NO: 1873 - DNA, 60 bp, Artificial Sequence
  Description of Artificial Sequence: targeting sequence/synthetic sequence
gaacgctgctcagatggctggagctttgatgctaccaccctggatgacaatggaaccatg

SEQ ID NO: 1874 - DNA, 60 bp, Artificial Sequence
  Description of Artificial Sequence: targeting sequence/synthetic sequence
tacaacatcagcgtgaccgaccccagcggcaagagcctgctcctggacccccctagcaac

SEQ ID NO: 1875 - DNA, 60 bp, Artificial Sequence
  Description of Artificial Sequence: targeting sequence/synthetic sequence
ctagcccagccttctactagtcgaaagcggccccgtgaaggggaagccgagggtgccgag

SEQ ID NO: 1876 - DNA, 60 bp, Artificial Sequence
  Description of Artificial Sequence: targeting sequence/synthetic sequence
ccgtgcccacggtgcccagagcccaaatcttgtgacacacctcccccatgcccacggtgc

SEQ ID NO: 1877 - DNA, 60 bp, Artificial Sequence
  Description of Artificial Sequence: targeting sequence/synthetic sequence
accgctcctgccgagacagccaccccagcgccggtggagaaatccccggctaagaagaag

SEQ ID NO: 1878 - DNA, 60 bp, Artificial Sequence
  Description of Artificial Sequence: targeting sequence/synthetic sequence
cccgtcaagaagctcatgcggacatccacgccgccgcccgccagcgtcatcaacaacatg

SEQ ID NO: 1879 - DNA, 60 bp, Artificial Sequence
  Description of Artificial Sequence: targeting sequence/synthetic sequence
tcaactccacctaccccatctccctcaactccacctaccccatctccctcatgctgccac

SEQ ID NO: 1880 - DNA, 60 bp, Artificial Sequence
  Description of Artificial Sequence: targeting sequence/synthetic sequence
gagctggccaagcacgcggtgtcggagggcaccaaggccgtcaccaagtacaccagttcc

SEQ ID NO: 1881 - DNA, 60 bp, Artificial Sequence
  Description of Artificial Sequence: targeting sequence/synthetic sequence
cctcctggcccctctggaaatgctggaccccctggccctcctggtcctgctggcaaagaa

SEQ ID NO: 1882 - DNA, 60 bp, Artificial Sequence
  Description of Artificial Sequence: targeting sequence/synthetic sequence
tctggtcctcgtggtctccctggcccccctggtgcacctggtccccaaggcttccaaggt

SEQ ID NO: 1883 - DNA, 60 bp, Artificial Sequence
  Description of Artificial Sequence: targeting sequence/synthetic sequence
gccaagaaagacttctttagctcccaccccctgcgggagcccgtgaacgccaccgaggac

SEQ ID NO: 1884 - DNA, 60 bp, Artificial Sequence
  Description of Artificial Sequence: targeting sequence/synthetic sequence
gctatagtagacgtccacttcgatcctacgacggccttccgagcaccggacgtcgctcgt

SEQ ID NO: 1885 - DNA, 60 bp, Artificial Sequence
  Description of Artificial Sequence: targeting sequence/synthetic sequence
gcatttggacatgctttagagagaggccgggattatgaaaagaataaagtctgcaaggaa

SEQ ID NO: 1886 - DNA, 60 bp, Artificial Sequence
  Description of Artificial Sequence: targeting sequence/synthetic sequence
gtcgctccttcgactcatcccactagtgcctcggtcactgttaccacgccgggtctgtta

SEQ ID NO: 1887 - DNA, 60 bp, Artificial Sequence
  Description of Artificial Sequence: targeting sequence/synthetic sequence
aataatgtcccctgctccccaaaggtggacttcacccttagctcagaaagagacttcgca

SEQ ID NO: 1888 - DNA, 60 bp, Artificial Sequence
  Description of Artificial Sequence: targeting sequence/synthetic sequence
gtgcctgaggcccaggaggatgtggaggccacctttccagtccatcagcctggcaactac

SEQ ID NO: 1889 - DNA, 60 bp, Artificial Sequence
  Description of Artificial Sequence: targeting sequence/synthetic sequence
ctgcaaaacaacgaggccggtcgcagggctgtgtataagatggcagacgtagcctgcaaa

SEQ ID NO: 1890 - DNA, 60 bp, Artificial Sequence
  Description of Artificial Sequence: targeting sequence/synthetic sequence
acctatgaaagcaaacgtatgggcatcatcgtgcgggatgaatcaactggagaaattacg

SEQ ID NO: 1891 - DNA, 60 bp, Artificial Sequence
  Description of Artificial Sequence: targeting sequence/synthetic sequence
cagcagccgttactgcggcacccggcgccccccggcccgggacccggacccgggcccggg

SEQ ID NO: 1892 - DNA, 60 bp, Artificial Sequence
  Description of Artificial Sequence: targeting sequence/synthetic sequence
ggtttggatggtgccaagggagatgctggtcctgctggtcctaagggtgagcctggcagc

SEQ ID NO: 1893 - DNA, 60 bp, Artificial Sequence
  Description of Artificial Sequence: targeting sequence/synthetic sequence
ttcttcaatgataagttggcagcccctttaccagaaatacctccagatgttgtgacagaa

SEQ ID NO: 1894 - DNA, 60 bp, Artificial Sequence
  Description of Artificial Sequence: targeting sequence/synthetic sequence
tacaccctgcccccatcccaggaggagatgaccaagaaccaggtcagcctgacctgcctg

SEQ ID NO: 1895 - DNA, 60 bp, Artificial Sequence
  Description of Artificial Sequence: targeting sequence/synthetic sequence
ttcgtgtgccgggacaagctgagctccaccagccagctgaagagcgtgggcctgaacctg

SEQ ID NO: 1896 - DNA, 60 bp, Artificial Sequence
  Description of Artificial Sequence: targeting sequence/synthetic sequence
catctcttaaagagaaggaatgtaccacatgaagatatctgtgaagactctgatatagat

SEQ ID NO: 1897 - DNA, 60 bp, Artificial Sequence
  Description of Artificial Sequence: targeting sequence/synthetic sequence
agtggcttcggtgacccactgatctgcgataaccaggttagcactggtgatacacgtata

SEQ ID NO: 1898 - DNA, 60 bp, Artificial Sequence
  Description of Artificial Sequence: targeting sequence/synthetic sequence
gagggctgcaagaaaatcattggccagctgcagagctccctgcagaccggcagcgaggaa

SEQ ID NO: 1899 - DNA, 60 bp, Artificial Sequence
  Description of Artificial Sequence: targeting sequence/synthetic sequence
ctggagcctaccgaccaggacttctaccagaagtttgccacaggcagtgtgcccatcccc

SEQ ID NO: 1900 - DNA, 60 bp, Artificial Sequence
  Description of Artificial Sequence: targeting sequence/synthetic sequence
aacgacgtggacaagctggtgtgccgggacaagctgagctccaccaaccagctgcggagc

SEQ ID NO: 1901 - DNA, 60 bp, Artificial Sequence
  Description of Artificial Sequence: targeting sequence/synthetic sequence
agcccctcgccctcacccgtgcccaagagcccctctgtggacaagtacaacgtgagcggc

SEQ ID NO: 1902 - DNA, 60 bp, Artificial Sequence
  Description of Artificial Sequence: targeting sequence/synthetic sequence
aactccatggaccccggctccacccctcctagctgctgcgtgcccaccaaactgactccc

SEQ ID NO: 1903 - DNA, 60 bp, Artificial Sequence
  Description of Artificial Sequence: targeting sequence/synthetic sequence
ccacaacaaccaccgaaaccgtgcgattctcaaccatgcttccacggagggacctgtcag

SEQ ID NO: 1904 - DNA, 60 bp, Artificial Sequence
  Description of Artificial Sequence: targeting sequence/synthetic sequence
tcctttgataaggtcaaggagcctcggaagtcaagagactcagagtcccatagcagggtg

SEQ ID NO: 1905 - DNA, 60 bp, Artificial Sequence
  Description of Artificial Sequence: targeting sequence/synthetic sequence
ggggccatggctgaggcgcctgggcccagtggcgaatcccgaggacactcagccactcag

SEQ ID NO: 1906 - DNA, 60 bp, Artificial Sequence
  Description of Artificial Sequence: targeting sequence/synthetic sequence
atcctggaccggcaagatcctccctctgtggtggtcaccagccaccaggccccaggagaa

SEQ ID NO: 1907 - DNA, 60 bp, Artificial Sequence
  Description of Artificial Sequence: targeting sequence/synthetic sequence
gagcagatcgccgacagccagcaccggagctaccggcagatggccaccacaaccaacccc

SEQ ID NO: 1908 - DNA, 60 bp, Artificial Sequence
  Description of Artificial Sequence: targeting sequence/synthetic sequence
caggccaagaaagacttctttagctcccaccccctgcgggagcccgtgaacgccaccgag

SEQ ID NO: 1909 - DNA, 60 bp, Artificial Sequence
  Description of Artificial Sequence: targeting sequence/synthetic sequence
catctagcagatgattgtatgaagcacttcaagggctcggtggagaagctgtgtagtgtg

SEQ ID NO: 1910 - DNA, 60 bp, Artificial Sequence
  Description of Artificial Sequence: targeting sequence/synthetic sequence
gcggacctgctggagaagatgctggagctagacgtggacaagcgcctgacggccgcgcag

SEQ ID NO: 1911 - DNA, 60 bp, Artificial Sequence
  Description of Artificial Sequence: targeting sequence/synthetic sequence
ccaaggtgcgagcacccacctcctggtcccgtgtgtggatccgacggtgtcacttatggt

SEQ ID NO: 1912 - DNA, 60 bp, Artificial Sequence
  Description of Artificial Sequence: targeting sequence/synthetic sequence
ttgctccaagatgaatttcctggaatcccatccccactggatgcagctgtggaatgtcac

SEQ ID NO: 1913 - DNA, 60 bp, Artificial Sequence
  Description of Artificial Sequence: targeting sequence/synthetic sequence
ccacctaccccatctccctcaactccacctaccccatctccctcatgctgccacccccga

SEQ ID NO: 1914 - DNA, 60 bp, Artificial Sequence
  Description of Artificial Sequence: targeting sequence/synthetic sequence
ctgcccgcgccggagttctccccggagccggagtccggcagggccttgcggctgcggtgc

SEQ ID NO: 1915 - DNA, 60 bp, Artificial Sequence
  Description of Artificial Sequence: targeting sequence/synthetic sequence
agccagagcaagctgatcgcccggacccagggcatcgaggacctgatcgacaccgccatc

SEQ ID NO: 1916 - DNA, 60 bp, Artificial Sequence
  Description of Artificial Sequence: targeting sequence/synthetic sequence
ggaccccctggcgagcgtggtggacctggtagccgtggtttccctggcgcagatggtgtt

SEQ ID NO: 1917 - DNA, 60 bp, Artificial Sequence
  Description of Artificial Sequence: targeting sequence/synthetic sequence
tctttgaagccaagcatttgtggcacagctgtgtgcaagaacatcccaggagattttgaa

SEQ ID NO: 1918 - DNA, 60 bp, Artificial Sequence
  Description of Artificial Sequence: targeting sequence/synthetic sequence
caggaattccctacctacgtggaacccacaaatgatgaaatctgtgaggcgttcaggaaa

SEQ ID NO: 1919 - DNA, 60 bp, Artificial Sequence
  Description of Artificial Sequence: targeting sequence/synthetic sequence
gaccttaacctgtgtgggctgacagaggacccagatcttcaggtttctgcgatgcagcac

SEQ ID NO: 1920 - DNA, 60 bp, Artificial Sequence
  Description of Artificial Sequence: targeting sequence/synthetic sequence
gttattgatcttacaatagaaagctcttctgacgaagaggaagaccctcctgccaaaagg

SEQ ID NO: 1921 - DNA, 60 bp, Artificial Sequence
  Description of Artificial Sequence: targeting sequence/synthetic sequence
ctggtgggtgtggggggtggagatgtagaagatgtgacgccgcggcccggcgggtgccag

SEQ ID NO: 1922 - DNA, 60 bp, Artificial Sequence
  Description of Artificial Sequence: targeting sequence/synthetic sequence
tttggacatgctttagagagaggccgggattatgaaaagaataaagtctgcaaggaattc

SEQ ID NO: 1923 - DNA, 60 bp, Artificial Sequence
  Description of Artificial Sequence: targeting sequence/synthetic sequence
gatcacaagcccagcaacaccaaggtggacaagagagttgagtccaaatatggtccccca

SEQ ID NO: 1924 - DNA, 60 bp, Artificial Sequence
  Description of Artificial Sequence: targeting sequence/synthetic sequence
agaagtgggcaagttctggaagttagtggttccaaggcagtagttcaggtatttgaaggg

SEQ ID NO: 1925 - DNA, 60 bp, Artificial Sequence
  Description of Artificial Sequence: targeting sequence/synthetic sequence
ggcgatgctggtccccctggccctgccggacccgctggaccccctggccccattggtaat

SEQ ID NO: 1926 - DNA, 60 bp, Artificial Sequence
  Description of Artificial Sequence: targeting sequence/synthetic sequence
tcggagataatagactcctcaaccaggagaatggagagcgaaagatcaccgctttatcgc

SEQ ID NO: 1927 - DNA, 60 bp, Artificial Sequence
  Description of Artificial Sequence: targeting sequence/synthetic sequence
caaaagaagttagaaaaggtgatggaagaagaaggcctaaaagatgaggagaaacgactc

SEQ ID NO: 1928 - DNA, 60 bp, Artificial Sequence
  Description of Artificial Sequence: targeting sequence/synthetic sequence
gtgcagacaaatggagagacagaaccagctccactagagaccaaaccgccaccctctggg

SEQ ID NO: 1929 - DNA, 60 bp, Artificial Sequence
  Description of Artificial Sequence: targeting sequence/synthetic sequence
ctggaccccatcagccccggcgacctgaccatggtgatcacccaggactgcgacagctgc

SEQ ID NO: 1930 - DNA, 60 bp, Artificial Sequence
  Description of Artificial Sequence: targeting sequence/synthetic sequence
gcactgaacctgtcactggatgagctgccgccggccctgagacaggacaacttctcgctg

SEQ ID NO: 1931 - DNA, 60 bp, Artificial Sequence
  Description of Artificial Sequence: targeting sequence/synthetic sequence
aggacatcagaaaaaaacgggtcatgcttcttgcggacggatcagctggatggggagacg

SEQ ID NO: 1932 - DNA, 60 bp, Artificial Sequence
  Description of Artificial Sequence: targeting sequence/synthetic sequence
tgtgatgttgaagactcaactacctgttttaatgctaagggccctctactaaagaaggaa

SEQ ID NO: 1933 - DNA, 60 bp, Artificial Sequence
  Description of Artificial Sequence: targeting sequence/synthetic sequence
ctggccgaggaacggcagatcggcaccgtgtgcaagcgggaccagagcgaccggggctgg

SEQ ID NO: 1934 - DNA, 60 bp, Artificial Sequence
  Description of Artificial Sequence: targeting sequence/synthetic sequence
caactgctggcagaatcttcgtccgcacggccccagctggagttgcacttgcggccgcaa

SEQ ID NO: 1935 - DNA, 60 bp, Artificial Sequence
  Description of Artificial Sequence: targeting sequence/synthetic sequence
agtggggccatggctgaggcgcctgggcccagtggcgaatcccgaggacactcagccact

SEQ ID NO: 1936 - DNA, 60 bp, Artificial Sequence
  Description of Artificial Sequence: targeting sequence/synthetic sequence
ctgatgaactccatggaccccggctccacccctcctagctgctgcgtgcccaccaaactg

SEQ ID NO: 1937 - DNA, 60 bp, Artificial Sequence
  Description of Artificial Sequence: targeting sequence/synthetic sequence
cctcccgtcaagaagctcatgcggacatccacgccgccgcccgccagcgtcatcaacaac

SEQ ID NO: 1938 - DNA, 60 bp, Artificial Sequence
  Description of Artificial Sequence: targeting sequence/synthetic sequence
ccaggtatagctggacctcgtggtagccctggtgagagaggtgaaactggccctccagga

SEQ ID NO: 1939 - DNA, 60 bp, Artificial Sequence
  Description of Artificial Sequence: targeting sequence/synthetic sequence
tccgacctggtctttcacatgcgatcccaccacaaaaaggagcatgcggggcctgaccca

SEQ ID NO: 1940 - DNA, 60 bp, Artificial Sequence
  Description of Artificial Sequence: targeting sequence/synthetic sequence
attctgagcgatgagacgctgcccgcgccggagttctccccggagccggagtccggcagg

SEQ ID NO: 1941 - DNA, 60 bp, Artificial Sequence
  Description of Artificial Sequence: targeting sequence/synthetic sequence
gctcttttaagaggtgtccagtgtcaggcgcagttggtggagtctgggggaggcgtggtc

SEQ ID NO: 1942 - DNA, 60 bp, Artificial Sequence
  Description of Artificial Sequence: targeting sequence/synthetic sequence
ccaccgaaaccgtgcgattctcaaccatgcttccacggagggacctgtcaggattgggca

SEQ ID NO: 1943 - DNA, 60 bp, Artificial Sequence
  Description of Artificial Sequence: targeting sequence/synthetic sequence
tcccccagctccccgcctcactccacgggctcggtgaggccggtcagggcacagggcgag

SEQ ID NO: 1944 - DNA, 60 bp, Artificial Sequence
  Description of Artificial Sequence: targeting sequence/synthetic sequence
ggtgcccctggccccgttggccctgctggcaagagtggtgatcgtggtgagactggtcct

SEQ ID NO: 1945 - DNA, 60 bp, Artificial Sequence
  Description of Artificial Sequence: targeting sequence/synthetic sequence
gaatcctggcagacagaagaaaaaacttgcgacttggtaggagaaaagggtaaagagtca

SEQ ID NO: 1946 - DNA, 60 bp, Artificial Sequence
  Description of Artificial Sequence: targeting sequence/synthetic sequence
gaccccggctccacccctcctagctgctgcgtgcccaccaaactgactcccatcagcatt

SEQ ID NO: 1947 - DNA, 60 bp, Artificial Sequence
  Description of Artificial Sequence: targeting sequence/synthetic sequence
gctacgtgcgctgaaatgcgatgcgaatttggggcacgatgcgttgaggagtctgggtct

SEQ ID NO: 1948 - DNA, 60 bp, Artificial Sequence
  Description of Artificial Sequence: targeting sequence/synthetic sequence
gatggcaagttttccgtggtatacgcaaaatgtgattccagtccagactcagccgaggac

SEQ ID NO: 1949 - DNA, 60 bp, Artificial Sequence
  Description of Artificial Sequence: targeting sequence/synthetic sequence
agtggcgaatcccgaggacactcagccactcagctgccagcggaaaaaactgtcggggga

SEQ ID NO: 1950 - DNA, 60 bp, Artificial Sequence
  Description of Artificial Sequence: targeting sequence/synthetic sequence
ggaccaattggtgagaagggatcccgaggagaccctgggaccccaggagtgcctggaaag

SEQ ID NO: 1951 - DNA, 60 bp, Artificial Sequence
  Description of Artificial Sequence: targeting sequence/synthetic sequence
gagatgaaagaagacatcaacacaaaaaaagaagacatgatgttccacaagatctacata

SEQ ID NO: 1952 - DNA, 60 bp, Artificial Sequence
  Description of Artificial Sequence: targeting sequence/synthetic sequence
tgtggctcagacggcgtaacctacagtacggaatgtgaactaaagaaagcacgctgtgaa

SEQ ID NO: 1953 - DNA, 60 bp, Artificial Sequence
  Description of Artificial Sequence: targeting sequence/synthetic sequence
ttgaaactagatggcaagttttccgtggtatacgcaaaatgtgattccagtccagactca

SEQ ID NO: 1954 - DNA, 60 bp, Artificial Sequence
  Description of Artificial Sequence: targeting sequence/synthetic sequence
actgtcgccctccgtgaaatccgccgctatcagaaatcgactgagctactgattcgcaag

SEQ ID NO: 1955 - DNA, 60 bp, Artificial Sequence
  Description of Artificial Sequence: targeting sequence/synthetic sequence
ttccaccggtacggcaccacagtgaactgcatcgtggaggaagtggacgcccggagcgtg

SEQ ID NO: 1956 - DNA, 60 bp, Artificial Sequence
  Description of Artificial Sequence: targeting sequence/synthetic sequence
gccaacggctgcgcccagctgatcaaccagctggagcccgccctgaagaccggcagcgag

SEQ ID NO: 1957 - DNA, 60 bp, Artificial Sequence
  Description of Artificial Sequence: targeting sequence/synthetic sequence
aacagaggagactccacatttgaaagcaagagctataaaatggcagatgaggccggaagt

SEQ ID NO: 1958 - DNA, 60 bp, Artificial Sequence
  Description of Artificial Sequence: targeting sequence/synthetic sequence
cccctgggcgtggtcaccaacagcaccctggaggtgaccgagatcgaccagctggtgtgc

SEQ ID NO: 1959 - DNA, 60 bp, Artificial Sequence
  Description of Artificial Sequence: targeting sequence/synthetic sequence
ctcccaaggaaatcatccattgtgaaaagaccaagaagtgcagagctgtcagaagatgac

SEQ ID NO: 1960 - DNA, 60 bp, Artificial Sequence
  Description of Artificial Sequence: targeting sequence/synthetic sequence
caagttctggaagttagtggttccaaggcagtagttcaggtatttgaagggacttcaggt

SEQ ID NO: 1961 - DNA, 60 bp, Artificial Sequence
  Description of Artificial Sequence: targeting sequence/synthetic sequence
cccggcggccctcctggtcccaagggtaacagcggtgaacctggtgctcctggcagcaaa

SEQ ID NO: 1962 - DNA, 60 bp, Artificial Sequence
  Description of Artificial Sequence: targeting sequence/synthetic sequence
gtgcggccaggcacccaggccctggagccaggggcggccaccgaggctgagggcttccct

SEQ ID NO: 1963 - DNA, 60 bp, Artificial Sequence
  Description of Artificial Sequence: targeting sequence/synthetic sequence
tgcctggccgagagccggaccacactgaacaagcggaacgacatcgagaagcggatcgag

SEQ ID NO: 1964 - DNA, 60 bp, Artificial Sequence
  Description of Artificial Sequence: targeting sequence/synthetic sequence
attcctaaagaagagaaggaccctggaatgggtgcaatgggtggaatgggaggtggtatg

SEQ ID NO: 1965 - DNA, 60 bp, Artificial Sequence
  Description of Artificial Sequence: targeting sequence/synthetic sequence
ctcagagatggccccagcgcacccctggaggctcctgagcctcggaagccggtgacagcc

SEQ ID NO: 1966 - DNA, 60 bp, Artificial Sequence
  Description of Artificial Sequence: targeting sequence/synthetic sequence
tgccatctaatggccactgcctccgccatggctggaccttcctctgagacgacctctgag

SEQ ID NO: 1967 - DNA, 60 bp, Artificial Sequence
  Description of Artificial Sequence: targeting sequence/synthetic sequence
caggcctcctcagtgcccactgcacaaccccaagcagagggcagcctcgccaaggcaacc

SEQ ID NO: 1968 - DNA, 60 bp, Artificial Sequence
  Description of Artificial Sequence: targeting sequence/synthetic sequence
gcacaggcctcctcagtgcccactgcacaaccccaagcagagggcagcctcgccaaggca

SEQ ID NO: 1969 - DNA, 60 bp, Artificial Sequence
  Description of Artificial Sequence: targeting sequence/synthetic sequence
gccttccaccggtacggcaccacagtgaactgcatcgtggaggaagtggacgcccggagc

SEQ ID NO: 1970 - DNA, 60 bp, Artificial Sequence
  Description of Artificial Sequence: targeting sequence/synthetic sequence
ggcagtgatggtcaaccaggccctcctggtcctcctggaactgccggattccctggatcc

SEQ ID NO: 1971 - DNA, 60 bp, Artificial Sequence
  Description of Artificial Sequence: targeting sequence/synthetic sequence
actgggaaagattgtcaagacattgccaataagggagctaaacagagcgggctttacttt

SEQ ID NO: 1972 - DNA, 60 bp, Artificial Sequence
  Description of Artificial Sequence: targeting sequence/synthetic sequence
ctggccaagcacgctgtgtcagagggcaccaaggccgttaccaagtacaccagctccaag

SEQ ID NO: 1973 - DNA, 60 bp, Artificial Sequence
  Description of Artificial Sequence: targeting sequence/synthetic sequence
cagcgcgccatgcacgactacaaccaggccgagatgaagcagcgcgacaactgcaagatc

SEQ ID NO: 1974 - DNA, 60 bp, Artificial Sequence
  Description of Artificial Sequence: targeting sequence/synthetic sequence
accctggtggaggaacaggacgccaacttcgtgtgccggagaaccttcgtggaccggggc

SEQ ID NO: 1975 - DNA, 60 bp, Artificial Sequence
  Description of Artificial Sequence: targeting sequence/synthetic sequence
ttagatagattcttcaatgataagttggcagcccctttaccagaaatacctccagatgtt

SEQ ID NO: 1976 - DNA, 60 bp, Artificial Sequence
  Description of Artificial Sequence: targeting sequence/synthetic sequence
attttagaaggtgtccagtgtgaggtgcaactaatggagtctgcgggaggcttggtcaag

SEQ ID NO: 1977 - DNA, 60 bp, Artificial Sequence
  Description of Artificial Sequence: targeting sequence/synthetic sequence
attgacaagggacaagaactatgtgcagattattcagaaaatacatttactgagtacaag

SEQ ID NO: 1978 - DNA, 60 bp, Artificial Sequence
  Description of Artificial Sequence: targeting sequence/synthetic sequence
ccacctggcccccctcgagtttccccagaccctcgggccgagctggacagcaccgtgctc

SEQ ID NO: 1979 - DNA, 60 bp, Artificial Sequence
  Description of Artificial Sequence: targeting sequence/synthetic sequence
tcctggaccctgtctccctttcaggatgctgcctcctcttcttcctcttcttcctcctcc

SEQ ID NO: 1980 - DNA, 60 bp, Artificial Sequence
  Description of Artificial Sequence: targeting sequence/synthetic sequence
atgacagtttttcgggaaccgactgctatttcagcaatggagctttccactaagcagcaa

SEQ ID NO: 1981 - DNA, 60 bp, Artificial Sequence
  Description of Artificial Sequence: targeting sequence/synthetic sequence
gcccgggtggccgacaccatgcccagcggccccaccaacagcgaggccgtgcccgccctg

SEQ ID NO: 1982 - DNA, 60 bp, Artificial Sequence
  Description of Artificial Sequence: targeting sequence/synthetic sequence
ggtaatgacggtgctcgaggcagtgatggtcaaccaggccctcctggtcctcctggaact

SEQ ID NO: 1983 - DNA, 60 bp, Artificial Sequence
  Description of Artificial Sequence: targeting sequence/synthetic sequence
ccaggaccaggagaagatgggctgaatccgtttttagaggtcaaggtaacagacacacca

SEQ ID NO: 1984 - DNA, 60 bp, Artificial Sequence
  Description of Artificial Sequence: targeting sequence/synthetic sequence
aaagatggcgtccgtggtctgaccggccccattggtcctcctggccctgctggtgcccct

SEQ ID NO: 1985 - DNA, 60 bp, Artificial Sequence
  Description of Artificial Sequence: targeting sequence/synthetic sequence
gtgaatcacaagcccagcaacaccaaggtggacaagaaagttgagcccaaatcttgtgac

SEQ ID NO: 1986 - DNA, 60 bp, Artificial Sequence
  Description of Artificial Sequence: targeting sequence/synthetic sequence
acgtgggcctcaaagatcaactactcacagtgtgagcccattttggatgacaagcagagg

SEQ ID NO: 1987 - DNA, 60 bp, Artificial Sequence
  Description of Artificial Sequence: targeting sequence/synthetic sequence
tttcccttcacctccgagagcaagcggatgggcgtcatcgtcagggatgaatccacggca

SEQ ID NO: 1988 - DNA, 60 bp, Artificial Sequence
  Description of Artificial Sequence: targeting sequence/synthetic sequence
gacttctgtcggatgcctcctccctgtagtgattcctgtgactttgatgaccccaggctg

SEQ ID NO: 1989 - DNA, 60 bp, Artificial Sequence
  Description of Artificial Sequence: targeting sequence/synthetic sequence
ctgtgccccaacaccgccccattgccccagctggtgactgaggccctgcagactggcacc

SEQ ID NO: 1990 - DNA, 60 bp, Artificial Sequence
  Description of Artificial Sequence: targeting sequence/synthetic sequence
aatcgaaacgtgaacccagtggctctgcctagagcccaggagggactgagacccgggacg

SEQ ID NO: 1991 - DNA, 60 bp, Artificial Sequence
  Description of Artificial Sequence: targeting sequence/synthetic sequence
atggccactgcctccgccatggctggaccttcctctgagacgacctctgaggaacagctg

SEQ ID NO: 1992 - DNA, 60 bp, Artificial Sequence
  Description of Artificial Sequence: targeting sequence/synthetic sequence
gcttcctccaatgaaacctttgatgggctggactgtccagctgcagggagggtggccctc

SEQ ID NO: 1993 - DNA, 60 bp, Artificial Sequence
  Description of Artificial Sequence: targeting sequence/synthetic sequence
atgggaatgctaccaaagcctcaggaacaagatgaaaaagataatactaaaaggttctta

SEQ ID NO: 1994 - DNA, 60 bp, Artificial Sequence
  Description of Artificial Sequence: targeting sequence/synthetic sequence
gcaggctccaaggtgctgatactggacgagcccacctcgggcatggacgccatctccagg

SEQ ID NO: 1995 - DNA, 60 bp, Artificial Sequence
  Description of Artificial Sequence: targeting sequence/synthetic sequence
acctgcgagcagatcgccgacagccagcaccagagccaccggcagatggtgaccacaacc

SEQ ID NO: 1996 - DNA, 60 bp, Artificial Sequence
  Description of Artificial Sequence: targeting sequence/synthetic sequence
ctcagctgcaagtcaagctgctctctgggctgtgatctccctgagacccacagcctggat

SEQ ID NO: 1997 - DNA, 60 bp, Artificial Sequence
  Description of Artificial Sequence: targeting sequence/synthetic sequence
atgttcttaccccgagatgacctcagcccagccagggacctactggatgtgccctcaaga

SEQ ID NO: 1998 - DNA, 60 bp, Artificial Sequence
  Description of Artificial Sequence: targeting sequence/synthetic sequence
gaagcacagaccactcaacccacaggcctggaggcacagaccactgcaccagcagccatg

SEQ ID NO: 1999 - DNA, 60 bp, Artificial Sequence
  Description of Artificial Sequence: targeting sequence/synthetic sequence
gccatggagatgaaagaagacatcaacacaaaaaaagaagacatgatgttccacaagatc

SEQ ID NO: 2000 - DNA, 60 bp, Artificial Sequence
  Description of Artificial Sequence: targeting sequence/synthetic sequence
tgcgaggctgccaagaaaacaaaagcagatgaccgaggaacagatgaaaagacttcagag

SEQ ID NO: 2001 - DNA, 60 bp, Artificial Sequence
  Description of Artificial Sequence: targeting sequence/synthetic sequence
ctggccggcaaccccgccaagcacgacctggacatcaagcccaccgtgatcagccaccgg

SEQ ID NO: 2002 - DNA, 60 bp, Artificial Sequence
  Description of Artificial Sequence: targeting sequence/synthetic sequence
cagagccaccggcagatggtgaccacaaccaaccccctgatccggcacgagaaccggatg

SEQ ID NO: 2003 - DNA, 60 bp, Artificial Sequence
  Description of Artificial Sequence: targeting sequence/synthetic sequence
agtgcccctgctacgtgcgctgaaatgcgatgcgaatttggggcacgatgcgttgaggag

SEQ ID NO: 2004 - DNA, 60 bp, Artificial Sequence
  Description of Artificial Sequence: targeting sequence/synthetic sequence
tgctcagattcagaagaggaaatgaaagcattagaagcagatttcttgaccaatatgcat

SEQ ID NO: 2005 - DNA, 60 bp, Artificial Sequence
  Description of Artificial Sequence: targeting sequence/synthetic sequence
gtgaccacggaccccccgcccgacgtgcacgtgagccgcgtcgggggcctggaggaccag

SEQ ID NO: 2006 - DNA, 60 bp, Artificial Sequence
  Description of Artificial Sequence: targeting sequence/synthetic sequence
gacctgttgaccaaaacacaggagctgggccgtgactacaggacctgtctgacgatagtc

SEQ ID NO: 2007 - DNA, 60 bp, Artificial Sequence
  Description of Artificial Sequence: targeting sequence/synthetic sequence
cctttcacctatgaaagcaaacgtatgggcatcatcgtgcgggatgaatcaactggagaa

SEQ ID NO: 2008 - DNA, 60 bp, Artificial Sequence
  Description of Artificial Sequence: targeting sequence/synthetic sequence
gggctcctagatgaggatggtaagaagactttctttcgggggctggagagtcagaccaag

SEQ ID NO: 2009 - DNA, 60 bp, Artificial Sequence
  Description of Artificial Sequence: targeting sequence/synthetic sequence
accatgaagctgtgcaaggacaccgaggacatcgagcagaccgccaacatccagggcgac

SEQ ID NO: 2010 - DNA, 60 bp, Artificial Sequence
  Description of Artificial Sequence: targeting sequence/synthetic sequence
gacgtggacaagctggtgtgccgggacaagctgagctccaccaaccagctgcggagcgtg

SEQ ID NO: 2011 - DNA, 60 bp, Artificial Sequence
  Description of Artificial Sequence: targeting sequence/synthetic sequence
ccccccggcccgggacccggacccgggcccgggcccgggcccggcgcagacatgcagcgc

SEQ ID NO: 2012 - DNA, 60 bp, Artificial Sequence
  Description of Artificial Sequence: targeting sequence/synthetic sequence
ccgggacccggacccgggcccgggcccgggcccggcgcagacatgcagcgcagctatgac

SEQ ID NO: 2013 - DNA, 60 bp, Artificial Sequence
  Description of Artificial Sequence: targeting sequence/synthetic sequence
gactgccacttggcccaggtcccttctcataccgtcgtggcccgaagtatgggcggcaag

SEQ ID NO: 2014 - DNA, 60 bp, Artificial Sequence
  Description of Artificial Sequence: targeting sequence/synthetic sequence
actccacctaccccatctccctcaactccacctaccccatctccctcatgctgccacccc

SEQ ID NO: 2015 - DNA, 60 bp, Artificial Sequence
  Description of Artificial Sequence: targeting sequence/synthetic sequence
atcattttcggccccggccccgtgctgaacgagaacgagaccatcgacatcggcatccag

SEQ ID NO: 2016 - DNA, 60 bp, Artificial Sequence
  Description of Artificial Sequence: targeting sequence/synthetic sequence
gaacctggacctcagggacacgctggtgctcaaggtcctcctggccctcctgggattaat

SEQ ID NO: 2017 - DNA, 60 bp, Artificial Sequence
  Description of Artificial Sequence: targeting sequence/synthetic sequence
gtgagtggggactacgggcaccctgtctacatcgtccaagagatgccgccccagagcccg

SEQ ID NO: 2018 - DNA, 60 bp, Artificial Sequence
  Description of Artificial Sequence: targeting sequence/synthetic sequence
ctggccaagcacgccgtgtccgagggcactaaggccgtcaccaagtacaccagctccaaa

SEQ ID NO: 2019 - DNA, 60 bp, Artificial Sequence
  Description of Artificial Sequence: targeting sequence/synthetic sequence
acccaaccaactacccagctcccaacagattctcctacccagcccactactgggtccttc

SEQ ID NO: 2020 - DNA, 60 bp, Artificial Sequence
  Description of Artificial Sequence: targeting sequence/synthetic sequence
tccgtcctaaactggcaggactgtgaggtgccaagtcctcagtcttgcagcccagagccc

SEQ ID NO: 2021 - DNA, 60 bp, Artificial Sequence
  Description of Artificial Sequence: targeting sequence/synthetic sequence
cagagagatggaggtgccctcgggcggggcccctgggactcctctgatcgatctgccctc

SEQ ID NO: 2022 - DNA, 60 bp, Artificial Sequence
  Description of Artificial Sequence: targeting sequence/synthetic sequence
acaggagacaaacaagaaactgcgattaatatagggtattcctgccgattggtatcgcag

SEQ ID NO: 2023 - DNA, 60 bp, Artificial Sequence
  Description of Artificial Sequence: targeting sequence/synthetic sequence
accgagggctgcaagaaaatcattggccagctgcagagctccctgcagaccggcagcgag

SEQ ID NO: 2024 - DNA, 60 bp, Artificial Sequence
  Description of Artificial Sequence: targeting sequence/synthetic sequence
cggcccgcgcctagccccggcctcggccccggacccgagtgtttcacagccaatggtgcg

SEQ ID NO: 2025 - DNA, 60 bp, Artificial Sequence
  Description of Artificial Sequence: targeting sequence/synthetic sequence
gaaccagctccactagagaccaaaccgccaccctctgggccacagcccaccagccaggcc

SEQ ID NO: 2026 - DNA, 60 bp, Artificial Sequence
  Description of Artificial Sequence: targeting sequence/synthetic sequence
agcgcccacgccggcgccgacgatgtggtcgacagctccaagagcttcgtgatggagaac

SEQ ID NO: 2027 - DNA, 60 bp, Artificial Sequence
  Description of Artificial Sequence: targeting sequence/synthetic sequence
tgcccacggtgcccagagcccaaatcttgtgacacacctcccccgtgcccacggtgccca

SEQ ID NO: 2028 - DNA, 60 bp, Artificial Sequence
  Description of Artificial Sequence: targeting sequence/synthetic sequence
tctggcattcctgtcaaagtttctgccacggtgtcttctcctgggtctgttcctgaagtc

SEQ ID NO: 2029 - DNA, 60 bp, Artificial Sequence
  Description of Artificial Sequence: targeting sequence/synthetic sequence
ctgccccaggccaagaaagacttctttagctcccaccccctgcgggagcccgtgaacgcc

SEQ ID NO: 2030 - DNA, 60 bp, Artificial Sequence
  Description of Artificial Sequence: targeting sequence/synthetic sequence
gaagagccccccaggtttatcaaagaacccaaggaccagatcggcgtgtcggggggtgtg

SEQ ID NO: 2031 - DNA, 60 bp, Artificial Sequence
  Description of Artificial Sequence: targeting sequence/synthetic sequence
ttctgtcaaacggcgtcaggccaggacggttctgggccgtttctcgctgacttcaatggg

SEQ ID NO: 2032 - DNA, 60 bp, Artificial Sequence
  Description of Artificial Sequence: targeting sequence/synthetic sequence
ggccccgatgggttgccaggatccatggggcccccaggcaccccatctgttgatcacggc

SEQ ID NO: 2033 - DNA, 60 bp, Artificial Sequence
  Description of Artificial Sequence: targeting sequence/synthetic sequence
tctgccctggagagcagcccagacccggccacactcagtaaagaggacgcgcgcctcctg

SEQ ID NO: 2034 - DNA, 60 bp, Artificial Sequence
  Description of Artificial Sequence: targeting sequence/synthetic sequence
gcagagtccaacagggagcgcggccagggccaggagcccgtgggatcgcaggagcatgcg

SEQ ID NO: 2035 - DNA, 60 bp, Artificial Sequence
  Description of Artificial Sequence: targeting sequence/synthetic sequence
cccagcggcaagagcctgctcctggacccccctaccaacatccgggactaccccaagtgc

SEQ ID NO: 2036 - DNA, 60 bp, Artificial Sequence
  Description of Artificial Sequence: targeting sequence/synthetic sequence
ctgggcgtggtcaccaacagcaccctggaggtgaccgagatcgaccagctggtgtgcaag

SEQ ID NO: 2037 - DNA, 60 bp, Artificial Sequence
  Description of Artificial Sequence: targeting sequence/synthetic sequence
gagggccggtgcgagcggatgggcgaggccgacgagaccatgtggggcaccaagtggtgc

SEQ ID NO: 2038 - DNA, 60 bp, Artificial Sequence
  Description of Artificial Sequence: targeting sequence/synthetic sequence
gatgtggtgaccacggaccccccgcccgacgtgcacgtgagccgcgtcgggggcctggag

SEQ ID NO: 2039 - DNA, 60 bp, Artificial Sequence
  Description of Artificial Sequence: targeting sequence/synthetic sequence
tgcgcgctcggcggcagcctgggcagcctgcctgccagccccttccgcatccccgaggac

SEQ ID NO: 2040 - DNA, 60 bp, Artificial Sequence
  Description of Artificial Sequence: targeting sequence/synthetic sequence
gagctttcccagcccaccctcacgatccagactcatccctaccgcacctgtgaccctgtg

SEQ ID NO: 2041 - DNA, 60 bp, Artificial Sequence
  Description of Artificial Sequence: targeting sequence/synthetic sequence
gagggctgtggcctgccacccaaggccctgcacactgccaccttccaggctctgcagagg

SEQ ID NO: 2042 - DNA, 60 bp, Artificial Sequence
  Description of Artificial Sequence: targeting sequence/synthetic sequence
cctggtcctgctggtcctccaggtgaagcaggcaaacctggtgaacagggtgttcctgga

SEQ ID NO: 2043 - DNA, 60 bp, Artificial Sequence
  Description of Artificial Sequence: targeting sequence/synthetic sequence
cctcctggtcctcaaggaccccctggcctccagggaccttctggtgctgctgataaagct

SEQ ID NO: 2044 - DNA, 60 bp, Artificial Sequence
  Description of Artificial Sequence: targeting sequence/synthetic sequence
ggccaagggacaatggtcaccgtctcttcagcctccaccaagggcccatcggtcttcccc

SEQ ID NO: 2045 - DNA, 60 bp, Artificial Sequence
  Description of Artificial Sequence: targeting sequence/synthetic sequence
gtgatcgggaaaggaacccattgcaaccaagtcgaagtgatagccacactgaaggatggg

SEQ ID NO: 2046 - DNA, 60 bp, Artificial Sequence
  Description of Artificial Sequence: targeting sequence/synthetic sequence
gactcttggggccggggcaccctggtcaccgtctcctcagcctccaccaagggcccatcg

SEQ ID NO: 2047 - DNA, 60 bp, Artificial Sequence
  Description of Artificial Sequence: targeting sequence/synthetic sequence
gaccatatgaaaagcgtcattccatccgatggtcccagtgttgcttgtgtgaagaaagcc

SEQ ID NO: 2048 - DNA, 60 bp, Artificial Sequence
  Description of Artificial Sequence: targeting sequence/synthetic sequence
aggcgatgtgcgccattgtcggcgcccacctcggccgctgcctccccgttgtcggcggcc

SEQ ID NO: 2049 - DNA, 60 bp, Artificial Sequence
  Description of Artificial Sequence: targeting sequence/synthetic sequence
gccgacgccgctcccgacctgttcgacttcctggacagctccgtgaccacagcccggacc

SEQ ID NO: 2050 - DNA, 60 bp, Artificial Sequence
  Description of Artificial Sequence: targeting sequence/synthetic sequence
aaaggcccctgtgatagatgtggacagtgtcgtttcggcgcactctgcgaagccgagaca

SEQ ID NO: 2051 - DNA, 60 bp, Artificial Sequence
  Description of Artificial Sequence: targeting sequence/synthetic sequence
atgagcgaggaaggcaacgaggaatgggagtgcaagcggagctacagcgaccggggctgg

SEQ ID NO: 2052 - DNA, 60 bp, Artificial Sequence
  Description of Artificial Sequence: targeting sequence/synthetic sequence
cagatcctgggccagctgcagcccagcctgcagaccggcagcgaggaatgccggagcctg

SEQ ID NO: 2053 - DNA, 60 bp, Artificial Sequence
  Description of Artificial Sequence: targeting sequence/synthetic sequence
cccaaatcttgtgacacacctcccccgtgcccacggtgcccagagcccaaatcttgtgac

SEQ ID NO: 2054 - DNA, 60 bp, Artificial Sequence
  Description of Artificial Sequence: targeting sequence/synthetic sequence
gcaaaatgtgattccagtccagactcagccgaggacgtgcgcaaggtgtgccaagactgc

SEQ ID NO: 2055 - DNA, 60 bp, Artificial Sequence
  Description of Artificial Sequence: targeting sequence/synthetic sequence
cacagcgactacaaggtgaagggcctgtgcgacagcaacctgatcagcatggacatcacc

SEQ ID NO: 2056 - DNA, 60 bp, Artificial Sequence
  Description of Artificial Sequence: targeting sequence/synthetic sequence
gaggtgcctcagacccgcctgcccctcacgtaccccgcacccaacggggacccaatcctg

SEQ ID NO: 2057 - DNA, 60 bp, Artificial Sequence
  Description of Artificial Sequence: targeting sequence/synthetic sequence
gggcagagagaccggaaggctgagcactggaaacataagaaggaagaatctggccgggaa

SEQ ID NO: 2058 - DNA, 60 bp, Artificial Sequence
  Description of Artificial Sequence: targeting sequence/synthetic sequence
gtgtttgagccatcagaagcagagatctcccacacccaaaaggccacactggtgtgcctg

SEQ ID NO: 2059 - DNA, 60 bp, Artificial Sequence
  Description of Artificial Sequence: targeting sequence/synthetic sequence
tgcggtagtgacggggtgacctacggtaatgaatgtcagctcaaaacgatagcgtgtcgg

SEQ ID NO: 2060 - DNA, 60 bp, Artificial Sequence
  Description of Artificial Sequence: targeting sequence/synthetic sequence
ccctcctggaccctgtctccctttcaggatgctgcctcctcttcttcctcttcttcctcc

SEQ ID NO: 2061 - DNA, 60 bp, Artificial Sequence
  Description of Artificial Sequence: targeting sequence/synthetic sequence
cagctggagatgctggagaaccagatcgccaccatccaccagagctgccccagccaggag

SEQ ID NO: 2062 - DNA, 60 bp, Artificial Sequence
  Description of Artificial Sequence: targeting sequence/synthetic sequence
gaagaactctcagccaaaaaaaggaaaaagagtagctcagaggctttatttaaaagtttt

SEQ ID NO: 2063 - DNA, 60 bp, Artificial Sequence
  Description of Artificial Sequence: targeting sequence/synthetic sequence
ccggagttctccccggagccggagtccggcagggccttgcggctgcggtgcctggcgccc

SEQ ID NO: 2064 - DNA, 60 bp, Artificial Sequence
  Description of Artificial Sequence: targeting sequence/synthetic sequence
ccgtcctgtgcgctggccgccctcccaaaggatgtacccaactctcagccagagatggtg

SEQ ID NO: 2065 - DNA, 60 bp, Artificial Sequence
  Description of Artificial Sequence: targeting sequence/synthetic sequence
cagcggagacgggacccctaccacgccaccagcggcgccctgagccccgccaaggactgc

SEQ ID NO: 2066 - DNA, 60 bp, Artificial Sequence
  Description of Artificial Sequence: targeting sequence/synthetic sequence
caggcagggatccccgtccgtgcgccccggagcccgcgcgccccagagcctgcgctggaa

SEQ ID NO: 2067 - DNA, 60 bp, Artificial Sequence
  Description of Artificial Sequence: targeting sequence/synthetic sequence
caacaaccaccgaaaccgtgcgattctcaaccatgcttccacggagggacctgtcaggat

SEQ ID NO: 2068 - DNA, 60 bp, Artificial Sequence
  Description of Artificial Sequence: targeting sequence/synthetic sequence
cagacaggtgatcttgaccagaataccatcgagaccatgcggaagccacgctgcggcaac

SEQ ID NO: 2069 - DNA, 60 bp, Artificial Sequence
  Description of Artificial Sequence: targeting sequence/synthetic sequence
atctgtaaaaaagattctctagataaagaaaaagaaaaacatattgaccgagaatttgtg

SEQ ID NO: 2070 - DNA, 60 bp, Artificial Sequence
  Description of Artificial Sequence: targeting sequence/synthetic sequence
actctctcctgtgagaacaaaattatttcctttaaggaaatgaatcctcctgataacatc

SEQ ID NO: 2071 - DNA, 60 bp, Artificial Sequence
  Description of Artificial Sequence: targeting sequence/synthetic sequence
cccagcgccaccaagcggtggggcttccggagcggcgtgccccctaaggtggtcagctac

SEQ ID NO: 2072 - DNA, 60 bp, Artificial Sequence
  Description of Artificial Sequence: targeting sequence/synthetic sequence
ggccgccagggcccgcagggagaaaagggtgaagcaggtcctcctggcccacctggaatt

SEQ ID NO: 2073 - DNA, 60 bp, Artificial Sequence
  Description of Artificial Sequence: targeting sequence/synthetic sequence
gaggccgtgctgcccgaggaacaggaccagaactacgtgtgcaagcacacctacgtggac

SEQ ID NO: 2074 - DNA, 60 bp, Artificial Sequence
  Description of Artificial Sequence: targeting sequence/synthetic sequence
ggtgaacctggtgctcctggcagcaaaggagacactggtgctaagggagagcctggccct

SEQ ID NO: 2075 - DNA, 60 bp, Artificial Sequence
  Description of Artificial Sequence: targeting sequence/synthetic sequence
tccgatgctgacagaaagggaggcaacagcagcgtgaagttggaggctggcctggccaac

SEQ ID NO: 2076 - DNA, 60 bp, Artificial Sequence
  Description of Artificial Sequence: targeting sequence/synthetic sequence
ccagagagccgcaaactggagaagtcagaagacgaaccacctttgactcttcctaagcct

SEQ ID NO: 2077 - DNA, 60 bp, Artificial Sequence
  Description of Artificial Sequence: targeting sequence/synthetic sequence
cagacaaatggagagacagaaccagctccactagagaccaaaccgccaccctctgggcca

SEQ ID NO: 2078 - DNA, 60 bp, Artificial Sequence
  Description of Artificial Sequence: targeting sequence/synthetic sequence
gggcctggtggtgacaaaggagacacaggaccccctggtccacaaggattacaaggcttg

SEQ ID NO: 2079 - DNA, 60 bp, Artificial Sequence
  Description of Artificial Sequence: targeting sequence/synthetic sequence
ctgagcgatgagacgctgcccgcgccggagttctccccggagccggagtccggcagggcc

SEQ ID NO: 2080 - DNA, 60 bp, Artificial Sequence
  Description of Artificial Sequence: targeting sequence/synthetic sequence
cgcaaactgccattccagcgtctagtccgtgagatcgcgcaggacttcaagactgatctg

SEQ ID NO: 2081 - DNA, 60 bp, Artificial Sequence
  Description of Artificial Sequence: targeting sequence/synthetic sequence
acgccgcccaatgccaccgaagcctccaagccccaaggcacaacggtgtgtcctccctgt

SEQ ID NO: 2082 - DNA, 60 bp, Artificial Sequence
  Description of Artificial Sequence: targeting sequence/synthetic sequence
ctgctctcaaacctgggccacccggagagccccccacggaaacggctgaagagcaaaggg

SEQ ID NO: 2083 - DNA, 60 bp, Artificial Sequence
  Description of Artificial Sequence: targeting sequence/synthetic sequence
aattccagtatccccaaagcctgttgtgtgcccactgaactgagtgccatctccatgctg

SEQ ID NO: 2084 - DNA, 60 bp, Artificial Sequence
  Description of Artificial Sequence: targeting sequence/synthetic sequence
ggcttcggtgacccactgatctgcgataaccaggttagcactggtgatacacgtatattc

SEQ ID NO: 2085 - DNA, 60 bp, Artificial Sequence
  Description of Artificial Sequence: targeting sequence/synthetic sequence
ttcacctccgagagcaagcggatgggcgtcatcgtcagggatgaatccacggcagaaatc

SEQ ID NO: 2086 - DNA, 60 bp, Artificial Sequence
  Description of Artificial Sequence: targeting sequence/synthetic sequence
cttgtgcctggcctggtaccaccagctcctagggctactggcatgagtgaaaagagccca

SEQ ID NO: 2087 - DNA, 60 bp, Artificial Sequence
  Description of Artificial Sequence: targeting sequence/synthetic sequence
gcaggctatggaggctcccctggccacactggctctacatccatgagcccatcagcagcc

SEQ ID NO: 2088 - DNA, 60 bp, Artificial Sequence
  Description of Artificial Sequence: targeting sequence/synthetic sequence
gcccccaccgaggcccggagacgggtggtcgagcgggagaagcgggccgtgggcatgggc

SEQ ID NO: 2089 - DNA, 60 bp, Artificial Sequence
  Description of Artificial Sequence: targeting sequence/synthetic sequence
atcctgccccaggccaagaaagacttctttagctcccaccccctgcgggagcccgtgaac

SEQ ID NO: 2090 - DNA, 60 bp, Artificial Sequence
  Description of Artificial Sequence: targeting sequence/synthetic sequence
caaggcgaagaccagtactatctgcgggtcaccacggtggcttcccacacttctgactcg

SEQ ID NO: 2091 - DNA, 60 bp, Artificial Sequence
  Description of Artificial Sequence: targeting sequence/synthetic sequence
atcgtgtgcggcgaggacgatccctgcggcacccagatctgcgagtgcgacaaggccgct

SEQ ID NO: 2092 - DNA, 60 bp, Artificial Sequence
  Description of Artificial Sequence: targeting sequence/synthetic sequence
ggaagatgctctgaaagggatgccaggctgggcctctgtgcacgttccaatgacgctgtt

SEQ ID NO: 2093 - DNA, 60 bp, Artificial Sequence
  Description of Artificial Sequence: targeting sequence/synthetic sequence
ccaccacctggcccccctcgagtttccccagaccctcgggccgagctggacagcaccgtg

SEQ ID NO: 2094 - DNA, 60 bp, Artificial Sequence
  Description of Artificial Sequence: targeting sequence/synthetic sequence
aagatggagcaggtgtctggcgtgctgggcatcgaggactactcggtcagccagaccaca

SEQ ID NO: 2095 - DNA, 60 bp, Artificial Sequence
  Description of Artificial Sequence: targeting sequence/synthetic sequence
ctgctcctggacccccctaccaacgtgcgggactaccccaagtgcaagaccatccaccat

SEQ ID NO: 2096 - DNA, 60 bp, Artificial Sequence
  Description of Artificial Sequence: targeting sequence/synthetic sequence
ggtcttggaagtcctggtccaaagggtgacaagggtgaaccaggcggtccaggtgctgat

SEQ ID NO: 2097 - DNA, 60 bp, Artificial Sequence
  Description of Artificial Sequence: targeting sequence/synthetic sequence
gtcggcctgcctggtcagagaggagagagaggcttccctggtcttcctggcccctctggt

SEQ ID NO: 2098 - DNA, 60 bp, Artificial Sequence
  Description of Artificial Sequence: targeting sequence/synthetic sequence
gattctgaagaactctcagccaaaaaaaggaaaaagagtagctcagaggctttatttaaa

SEQ ID NO: 2099 - DNA, 60 bp, Artificial Sequence
  Description of Artificial Sequence: targeting sequence/synthetic sequence
ggcagcctgggcagcctgcctgccagccccttccgcatccccgaggacgacgagtacgag

SEQ ID NO: 2100 - DNA, 60 bp, Artificial Sequence
  Description of Artificial Sequence: targeting sequence/synthetic sequence
agcggcaagagcctgctcctggacccccctaccaacgtgcgggactaccccaagtgcaag

SEQ ID NO: 2101 - DNA, 60 bp, Artificial Sequence
  Description of Artificial Sequence: targeting sequence/synthetic sequence
gcattggagaaaatgatggagtcaagttttgtcggcccccagtcattccctgaggtccct

SEQ ID NO: 2102 - DNA, 60 bp, Artificial Sequence
  Description of Artificial Sequence: targeting sequence/synthetic sequence
aaaagagatatcccttggccagaaggtgaagaaaagttatctgataatgctcaaagtgca

SEQ ID NO: 2103 - DNA, 60 bp, Artificial Sequence
  Description of Artificial Sequence: targeting sequence/synthetic sequence
atcgcgctctgccacaacgtgactcccgtgtatgagtccaacggtgtgactgatcaggct

SEQ ID NO: 2104 - DNA, 60 bp, Artificial Sequence
  Description of Artificial Sequence: targeting sequence/synthetic sequence
acaagggccagttctgtgcccatcatcccttcagtgggtttagaggaaacctgcctgcaa

SEQ ID NO: 2105 - DNA, 60 bp, Artificial Sequence
  Description of Artificial Sequence: targeting sequence/synthetic sequence
cctttaataatctgtaaaaaagattctctagataaagaaaaagaaaaacatattgaccga

SEQ ID NO: 2106 - DNA, 60 bp, Artificial Sequence
  Description of Artificial Sequence: targeting sequence/synthetic sequence
ctcttaggttcagaagcgaacctcacgtgcacactgaccggcctgagagatgcctcaggt

SEQ ID NO: 2107 - DNA, 60 bp, Artificial Sequence
  Description of Artificial Sequence: targeting sequence/synthetic sequence
ttccatgagaaggacctcgtgcagcctataaaccctcgtctggatggctgcatgaggagc

SEQ ID NO: 2108 - DNA, 60 bp, Artificial Sequence
  Description of Artificial Sequence: targeting sequence/synthetic sequence
ctggaggagagctgtgcggaggcgcaggacggggagctggacgggctgtggacgaccatc

SEQ ID NO: 2109 - DNA, 60 bp, Artificial Sequence
  Description of Artificial Sequence: targeting sequence/synthetic sequence
ttcggccccggccccgtgctgagcgacaacttcaccgacagcatgatcatgaacggccac

SEQ ID NO: 2110 - DNA, 60 bp, Artificial Sequence
  Description of Artificial Sequence: targeting sequence/synthetic sequence
ggccctgtgacccaggagttctgggataacctggaaaaggagacagagggcctgaggcag

SEQ ID NO: 2111 - DNA, 60 bp, Artificial Sequence
  Description of Artificial Sequence: targeting sequence/synthetic sequence
gaggctacgtctgccctggattcagaaagcaagtcagctgttcaagctgcactggagaag

SEQ ID NO: 2112 - DNA, 60 bp, Artificial Sequence
  Description of Artificial Sequence: targeting sequence/synthetic sequence
cagcaaaacacagacgggagcggccaagtcagcattccaataattatccctcagaccatc

SEQ ID NO: 2113 - DNA, 60 bp, Artificial Sequence
  Description of Artificial Sequence: targeting sequence/synthetic sequence
gagacgctgcccgcgccggagttctccccggagccggagtccggcagggccttgcggctg

SEQ ID NO: 2114 - DNA, 60 bp, Artificial Sequence
  Description of Artificial Sequence: targeting sequence/synthetic sequence
ggtcctcctggccctgctggtgcccctggtgacaagggtgaaagtggtcccagcggccct

SEQ ID NO: 2115 - DNA, 60 bp, Artificial Sequence
  Description of Artificial Sequence: targeting sequence/synthetic sequence
accctgtctccctttcaggatgctgcctcctcttcttcctcttcttcctcctccgctacc

SEQ ID NO: 2116 - DNA, 60 bp, Artificial Sequence
  Description of Artificial Sequence: targeting sequence/synthetic sequence
ggtcacgctggcaatctggcccggtgctcggagctgacccagtcgcaggcatcgctgcag

SEQ ID NO: 2117 - DNA, 60 bp, Artificial Sequence
  Description of Artificial Sequence: targeting sequence/synthetic sequence
gaggtgagccccggctgctggatcattgacgataacatctgcgaccagagctgccagaac

SEQ ID NO: 2118 - DNA, 60 bp, Artificial Sequence
  Description of Artificial Sequence: targeting sequence/synthetic sequence
ttaccagggatgaagggtgatccaggtgagatacttggccatgtgcccgggatgctgttg

SEQ ID NO: 2119 - DNA, 60 bp, Artificial Sequence
  Description of Artificial Sequence: targeting sequence/synthetic sequence
ggcccccagggtgacctgttgaccaaaacacaggagctgggccgtgactacaggacctgt

SEQ ID NO: 2120 - DNA, 60 bp, Artificial Sequence
  Description of Artificial Sequence: targeting sequence/synthetic sequence
attggctcctcacacatcctcaccccgacccgcttcctggatgacctgaaggcactggac

SEQ ID NO: 2121 - DNA, 60 bp, Artificial Sequence
  Description of Artificial Sequence: targeting sequence/synthetic sequence
acagctgtcgcccctgggccaccacctggcccccctcgagtttccccagaccctcgggcc

SEQ ID NO: 2122 - DNA, 60 bp, Artificial Sequence
  Description of Artificial Sequence: targeting sequence/synthetic sequence
gtttctccacctggtggtgatttttctgatccagttacatctgccactcttggtatcgtt

SEQ ID NO: 2123 - DNA, 60 bp, Artificial Sequence
  Description of Artificial Sequence: targeting sequence/synthetic sequence
accatgaagctgtgcaaggacgccagcgacatcctgcagaccggcaccatccagggcgac

SEQ ID NO: 2124 - DNA, 60 bp, Artificial Sequence
  Description of Artificial Sequence: targeting sequence/synthetic sequence
cacctgctgccgccgccgtcggaggagctggccctgaacgagctggtgacgctgacgtgc

SEQ ID NO: 2125 - DNA, 60 bp, Artificial Sequence
  Description of Artificial Sequence: targeting sequence/synthetic sequence
aagaccatctgccagcaagccgtggacaccgtgctggccaagaaacgggtggacagcctg

SEQ ID NO: 2126 - DNA, 60 bp, Artificial Sequence
  Description of Artificial Sequence: targeting sequence/synthetic sequence
ttctgcgtcgaggataagcctggcactcattttacaccggttccacctactccgcccgac

SEQ ID NO: 2127 - DNA, 60 bp, Artificial Sequence
  Description of Artificial Sequence: targeting sequence/synthetic sequence
cgggccggcgtgccccctaaggtggtcaactacgaggccggcgagtgggccgagaactgc

SEQ ID NO: 2128 - DNA, 60 bp, Artificial Sequence
  Description of Artificial Sequence: targeting sequence/synthetic sequence
ccagaaaaatacgcgtgcaaagaccttcgggagaacttctgccggaaccccgacggctca

SEQ ID NO: 2129 - DNA, 60 bp, Artificial Sequence
  Description of Artificial Sequence: targeting sequence/synthetic sequence
tgtcctgacgaacctgatagccagccctgctcccttgtgcctggcctggtaccaccagct

SEQ ID NO: 2130 - DNA, 60 bp, Artificial Sequence
  Description of Artificial Sequence: targeting sequence/synthetic sequence
gctcgtggaaatgatggtgctactggtgctgccgggccccctggtcccaccggccccgct

SEQ ID NO: 2131 - DNA, 60 bp, Artificial Sequence
  Description of Artificial Sequence: targeting sequence/synthetic sequence
tctcctacaaaagaaagctgcagcccctctgaagcagatgacacaaaagctttgatacag

SEQ ID NO: 2132 - DNA, 60 bp, Artificial Sequence
  Description of Artificial Sequence: targeting sequence/synthetic sequence
gaggcggtcgctccttcgactcatcccactagtgcctcggtcactgttaccacgccgggt

SEQ ID NO: 2133 - DNA, 60 bp, Artificial Sequence
  Description of Artificial Sequence: targeting sequence/synthetic sequence
gggattcctgggtttccaggttccaagggagaaatgggcgtcatggggacccccgggcag

SEQ ID NO: 2134 - DNA, 60 bp, Artificial Sequence
  Description of Artificial Sequence: targeting sequence/synthetic sequence
gccattgctaatctgaaagctgatacttcatctcctgaggaggaatataaggtggcctgc

SEQ ID NO: 2135 - DNA, 60 bp, Artificial Sequence
  Description of Artificial Sequence: targeting sequence/synthetic sequence
gagcctggcccccctggccctgctggtgctgctggccctgctggaaaccctggtgctgat

SEQ ID NO: 2136 - DNA, 60 bp, Artificial Sequence
  Description of Artificial Sequence: targeting sequence/synthetic sequence
gctgaggcgcctgggcccagtggcgaatcccgaggacactcagccactcagctgccagcg

SEQ ID NO: 2137 - DNA, 60 bp, Artificial Sequence
  Description of Artificial Sequence: targeting sequence/synthetic sequence
gaagttgaatatgattgtgatgctcccagtcacaactcagaaaaaaagaaaactgaaggc

SEQ ID NO: 2138 - DNA, 60 bp, Artificial Sequence
  Description of Artificial Sequence: targeting sequence/synthetic sequence
gatggagtggctgtgctgaaggttggtgggacaagtgatgttgaagtgaatgaaaagaaa

SEQ ID NO: 2139 - DNA, 60 bp, Artificial Sequence
  Description of Artificial Sequence: targeting sequence/synthetic sequence
gacgaagaggaagaccctcctgccaaaaggaaatgcatctttatgtcagaaacacaaagc

SEQ ID NO: 2140 - DNA, 60 bp, Artificial Sequence
  Description of Artificial Sequence: targeting sequence/synthetic sequence
gagacccctcagcctcctcggaagaaaagggcccgggtagatcctactgttgaaaatgag

SEQ ID NO: 2141 - DNA, 60 bp, Artificial Sequence
  Description of Artificial Sequence: targeting sequence/synthetic sequence
aaggagggctgccagaagatcctgaccgtgctggaccccctggtgcccaccggcagcgag

SEQ ID NO: 2142 - DNA, 60 bp, Artificial Sequence
  Description of Artificial Sequence: targeting sequence/synthetic sequence
aaaggagaaggccctttcagtcccaccacggtggtgtattctgcagaagaagaacccacc

SEQ ID NO: 2143 - DNA, 60 bp, Artificial Sequence
  Description of Artificial Sequence: targeting sequence/synthetic sequence
agcagcagcagcgagagcggcagcagcagcaggagcagcagcaacaacagcagcatctct

SEQ ID NO: 2144 - DNA, 60 bp, Artificial Sequence
  Description of Artificial Sequence: targeting sequence/synthetic sequence
gtgctggagatcgccagcaacagccagccccaggacgtggacagcgtgtgcagcggcacc

SEQ ID NO: 2145 - DNA, 60 bp, Artificial Sequence
  Description of Artificial Sequence: targeting sequence/synthetic sequence
atgaagctgtgcaaggacaccgaggacatcgagcagagcgccaacatccagggcgacggc

SEQ ID NO: 2146 - DNA, 60 bp, Artificial Sequence
  Description of Artificial Sequence: targeting sequence/synthetic sequence
tttggaatttctgacactcccctggaagagatttttctgaaggtcacggaggattctgat

SEQ ID NO: 2147 - DNA, 60 bp, Artificial Sequence
  Description of Artificial Sequence: targeting sequence/synthetic sequence
ggctgcgcccagctgatcaaccagctggagcccgccctgaagaccggcagcgagggcctg

SEQ ID NO: 2148 - DNA, 60 bp, Artificial Sequence
  Description of Artificial Sequence: targeting sequence/synthetic sequence
cctgtctcccctatctgggaacctcctccagccacaacatcaacaactccagttctatcc

SEQ ID NO: 2149 - DNA, 60 bp, Artificial Sequence
  Description of Artificial Sequence: targeting sequence/synthetic sequence
caaaagtgtgagatcgccctggagaaactcaagaatgacatggcggtgcccactccccca

SEQ ID NO: 2150 - DNA, 60 bp, Artificial Sequence
  Description of Artificial Sequence: targeting sequence/synthetic sequence
ctcgccagccccccgagccagggggaggtgccgcccggcccgctgcccgaggccgtgctc

SEQ ID NO: 2151 - DNA, 60 bp, Artificial Sequence
  Description of Artificial Sequence: targeting sequence/synthetic sequence
ccatcccaggaggagatgaccaagaaccaggtcagcctgacctgcctggtcaaaggcttc

SEQ ID NO: 2152 - DNA, 60 bp, Artificial Sequence
  Description of Artificial Sequence: targeting sequence/synthetic sequence
gagtttccctatccatgctatgacccagccacacgcgaaggtgaccttaaacttttacag

SEQ ID NO: 2153 - DNA, 60 bp, Artificial Sequence
  Description of Artificial Sequence: targeting sequence/synthetic sequence
ggctattcatccacaagggccagttctgtgcccatcatcccttcagtgggtttagaggaa

SEQ ID NO: 2154 - DNA, 60 bp, Artificial Sequence
  Description of Artificial Sequence: targeting sequence/synthetic sequence
tcaactctctcctgtgagaacaaaattatttcctttaaggaaatgaatcctcctgataac

SEQ ID NO: 2155 - DNA, 60 bp, Artificial Sequence
  Description of Artificial Sequence: targeting sequence/synthetic sequence
gccttccagcacccgccaacagaattcatacgagaaggcgacgatgaccggactgtgtgc

SEQ ID NO: 2156 - DNA, 60 bp, Artificial Sequence
  Description of Artificial Sequence: targeting sequence/synthetic sequence
tatgaccttaacctgtgtgggctgacagaggacccagatcttcaggtttctgcgatgcag

SEQ ID NO: 2157 - DNA, 60 bp, Artificial Sequence
  Description of Artificial Sequence: targeting sequence/synthetic sequence
ggcggaaagctggacgcctgggagaagatccggctgcggcccggcggaaagaaaaagtac

SEQ ID NO: 2158 - DNA, 60 bp, Artificial Sequence
  Description of Artificial Sequence: targeting sequence/synthetic sequence
aagcagtacgaagactcctgccgcgtataccaggcatccagccccgatgaggtggccctg

SEQ ID NO: 2159 - DNA, 60 bp, Artificial Sequence
  Description of Artificial Sequence: targeting sequence/synthetic sequence
gctaagactcggtcttctcgtgcaggtttgcagtttcctgtgggccgagtgcaccgcctg

SEQ ID NO: 2160 - DNA, 60 bp, Artificial Sequence
  Description of Artificial Sequence: targeting sequence/synthetic sequence
ctgtcgctgcaccgaccggccctcgaggacctgctcttaggttcagaagcgaacctcacg

SEQ ID NO: 2161 - DNA, 60 bp, Artificial Sequence
  Description of Artificial Sequence: targeting sequence/synthetic sequence
gggccccctggtcccaccggccccgctggtcctcctggcttccctggtgctgttggtgct

SEQ ID NO: 2162 - DNA, 60 bp, Artificial Sequence
  Description of Artificial Sequence: targeting sequence/synthetic sequence
gagggctgccagaagatcattaccgtgctggaccccctggtgcccaccggcagcgagaac

SEQ ID NO: 2163 - DNA, 60 bp, Artificial Sequence
  Description of Artificial Sequence: targeting sequence/synthetic sequence
aagcagctggagatgctggagaaccagatcagcaccatccaccagagctgccccagccag

SEQ ID NO: 2164 - DNA, 60 bp, Artificial Sequence
  Description of Artificial Sequence: targeting sequence/synthetic sequence
ccagggcaaccaggccctcctggacctcctggtgcccctggtccttgctgtggtggtgtt

SEQ ID NO: 2165 - DNA, 60 bp, Artificial Sequence
  Description of Artificial Sequence: targeting sequence/synthetic sequence
acattgcaacaagaaaagccagatttctgctttttggaagaagatcctggaatatgtcga

SEQ ID NO: 2166 - DNA, 60 bp, Artificial Sequence
  Description of Artificial Sequence: targeting sequence/synthetic sequence
cgatgtgcgccattgtcggcgcccacctcggccgctgcctccccgttgtcggcggccgcg

SEQ ID NO: 2167 - DNA, 60 bp, Artificial Sequence
  Description of Artificial Sequence: targeting sequence/synthetic sequence
gaagatgacacttgggagcctgagcagaaactttgcaaattgaggaaaggaaactgcagc

SEQ ID NO: 2168 - DNA, 60 bp, Artificial Sequence
  Description of Artificial Sequence: targeting sequence/synthetic sequence
cttgaccagaataccatcgagaccatgcggaagccacgctgcggcaacccagatgtggcc

SEQ ID NO: 2169 - DNA, 60 bp, Artificial Sequence
  Description of Artificial Sequence: targeting sequence/synthetic sequence
tcccagcccaccctcacgatccagactcatccctaccgcacctgtgaccctgtggagatg

SEQ ID NO: 2170 - DNA, 60 bp, Artificial Sequence
  Description of Artificial Sequence: targeting sequence/synthetic sequence
aactctacaactccttactgcaatgatttgatgaagaatttggagtctagtcctctttcc

SEQ ID NO: 2171 - DNA, 60 bp, Artificial Sequence
  Description of Artificial Sequence: targeting sequence/synthetic sequence
tacaccctgcccccatcccgggatgagctgaccaagaaccaggtcagcctgacctgcctg

SEQ ID NO: 2172 - DNA, 60 bp, Artificial Sequence
  Description of Artificial Sequence: targeting sequence/synthetic sequence
cctgttattccaactgcgcctacaagcaaaccatcttctgctggtggagaacttcttgat

SEQ ID NO: 2173 - DNA, 60 bp, Artificial Sequence
  Description of Artificial Sequence: targeting sequence/synthetic sequence
tgcgccctgcctgtggccctgtctggatctgggggacctcctgctctgaaccatgctgtg

SEQ ID NO: 2174 - DNA, 60 bp, Artificial Sequence
  Description of Artificial Sequence: targeting sequence/synthetic sequence
agctccccgcctcactccacgggctcggtgaggccggtcagggcacagggcgagggcctc

SEQ ID NO: 2175 - DNA, 60 bp, Artificial Sequence
  Description of Artificial Sequence: targeting sequence/synthetic sequence
gtgtgccgggacaagctgagctccaccaaccagctgcggagcgtgggcctgaacctggag

SEQ ID NO: 2176 - DNA, 60 bp, Artificial Sequence
  Description of Artificial Sequence: targeting sequence/synthetic sequence
acaactcgactgacggccacggaggcacagaccactccactggcagccacagaggcacag

SEQ ID NO: 2177 - DNA, 60 bp, Artificial Sequence
  Description of Artificial Sequence: targeting sequence/synthetic sequence
atccggcagaccgcagggaagggactggagtggattggatatatctctcacagtgggagc

SEQ ID NO: 2178 - DNA, 60 bp, Artificial Sequence
  Description of Artificial Sequence: targeting sequence/synthetic sequence
gaggtgcctgaggcccaggaggatgtggaggccacctttccagtccatcagcctggcaac

SEQ ID NO: 2179 - DNA, 60 bp, Artificial Sequence
  Description of Artificial Sequence: targeting sequence/synthetic sequence
aagtcaagctgctctctggactgtgatctgcctcagacccacagcctgggtcacaggagg

SEQ ID NO: 2180 - DNA, 60 bp, Artificial Sequence
  Description of Artificial Sequence: targeting sequence/synthetic sequence
atgatggctttcattgagcaggaagccaatgagaaagcagaggaaatcgatgccaaggct

SEQ ID NO: 2181 - DNA, 60 bp, Artificial Sequence
  Description of Artificial Sequence: targeting sequence/synthetic sequence
aggtctgccctggagagcagcccagacccggccacactcagtaaagaggacgcgcgcctc

SEQ ID NO: 2182 - DNA, 60 bp, Artificial Sequence
  Description of Artificial Sequence: targeting sequence/synthetic sequence
ggtgatcaaggcgatcacggcgtcccgggagctaaaggtctcccgggtcctcctggcccc

SEQ ID NO: 2183 - DNA, 60 bp, Artificial Sequence
  Description of Artificial Sequence: targeting sequence/synthetic sequence
tggaccctgtctccctttcaggatgctgcctcctcttcttcctcttcttcctcctccgct

SEQ ID NO: 2184 - DNA, 60 bp, Artificial Sequence
  Description of Artificial Sequence: targeting sequence/synthetic sequence
agaggggctccgggtgagaaaggtgaaggaggccctcctggagttgcaggacctcctggc

SEQ ID NO: 2185 - DNA, 60 bp, Artificial Sequence
  Description of Artificial Sequence: targeting sequence/synthetic sequence
gaggtgagccccggctgctgggtgatcgacaacaatatctgcgaccagagctgccagaac

SEQ ID NO: 2186 - DNA, 60 bp, Artificial Sequence
  Description of Artificial Sequence: targeting sequence/synthetic sequence
gagcggcttcggagagggctagctgctggaaccagcaacccggaccctcccactgtatcc

SEQ ID NO: 2187 - DNA, 60 bp, Artificial Sequence
  Description of Artificial Sequence: targeting sequence/synthetic sequence
ctccaagatgaatttcctggaatcccatccccactggatgcagctgtggaatgtcaccgt

SEQ ID NO: 2188 - DNA, 60 bp, Artificial Sequence
  Description of Artificial Sequence: targeting sequence/synthetic sequence
tgtcctctcatccttacccaagaactggggaaagccaacactactgactttgggttaact

SEQ ID NO: 2189 - DNA, 60 bp, Artificial Sequence
  Description of Artificial Sequence: targeting sequence/synthetic sequence
cgcacggccgagccggctgaaagcagcgtgcctccagtcaccagcattgggattgacaac

SEQ ID NO: 2190 - DNA, 60 bp, Artificial Sequence
  Description of Artificial Sequence: targeting sequence/synthetic sequence
ggaggctcccctggccacactggctctacatccatgagcccatcagcagccttgtccaca

SEQ ID NO: 2191 - DNA, 60 bp, Artificial Sequence
  Description of Artificial Sequence: targeting sequence/synthetic sequence
ctgttgaaactagatggcaagttttccgtggtatacgcaaaatgtgattccagtccagac

SEQ ID NO: 2192 - DNA, 60 bp, Artificial Sequence
  Description of Artificial Sequence: targeting sequence/synthetic sequence
acagctaataccactgatgaacccaccacacaacccaccacagagcccaccacccaaccc

SEQ ID NO: 2193 - DNA, 60 bp, Artificial Sequence
  Description of Artificial Sequence: targeting sequence/synthetic sequence
agtagtatttttgatgggttggtggaagaagatgacaaggacaaagcgaaaagagtatct

SEQ ID NO: 2194 - DNA, 60 bp, Artificial Sequence
  Description of Artificial Sequence: targeting sequence/synthetic sequence
aaagaagagaaggaccctggaatgggtgcaatgggtggaatgggaggtggtatgggaggt

SEQ ID NO: 2195 - DNA, 60 bp, Artificial Sequence
  Description of Artificial Sequence: targeting sequence/synthetic sequence
cgcctaagccccctcgctgagcgccagctacaggtgcagtgggagcctcccgggtcctgg

SEQ ID NO: 2196 - DNA, 60 bp, Artificial Sequence
  Description of Artificial Sequence: targeting sequence/synthetic sequence
actactgggtccttctgcccaggacctgttactctctgctctgacttggagagtcattca

SEQ ID NO: 2197 - DNA, 60 bp, Artificial Sequence
  Description of Artificial Sequence: targeting sequence/synthetic sequence
ggctacgacgtggagaagaataacagccgcattaagctgggcctcaagagcttggtgagc

SEQ ID NO: 2198 - DNA, 60 bp, Artificial Sequence
  Description of Artificial Sequence: targeting sequence/synthetic sequence
aaagttgtagactttggtagtgcaacatatgatgacgaacatcacagtacattggtatct

SEQ ID NO: 2199 - DNA, 60 bp, Artificial Sequence
  Description of Artificial Sequence: targeting sequence/synthetic sequence
acgtccgacctggtctttcacatgcgatcccaccacaaaaaggagcatgcggggcctgac

SEQ ID NO: 2200 - DNA, 60 bp, Artificial Sequence
  Description of Artificial Sequence: targeting sequence/synthetic sequence
cgtaataatgtcccctgctccccaaaggtggacttcacccttagctcagaaagagacttc

SEQ ID NO: 2201 - DNA, 60 bp, Artificial Sequence
  Description of Artificial Sequence: targeting sequence/synthetic sequence
ctaattaagtacaagaaaacgctgctgggagatggtcctgtggtgacagatccgaaagcc

SEQ ID NO: 2202 - DNA, 60 bp, Artificial Sequence
  Description of Artificial Sequence: targeting sequence/synthetic sequence
tcccttgtgcctggcctggtaccaccagctcctagggctactggcatgagtgaaaagagc

SEQ ID NO: 2203 - DNA, 60 bp, Artificial Sequence
  Description of Artificial Sequence: targeting sequence/synthetic sequence
gtggacatccctaagcaggagaaggccctgatgaaggcagttgcaactgtggggcccatt

SEQ ID NO: 2204 - DNA, 60 bp, Artificial Sequence
  Description of Artificial Sequence: targeting sequence/synthetic sequence
ggccctggatccccaggcctgccaggtccaaagggtgaaccaggaaaaattgttccttta

SEQ ID NO: 2205 - DNA, 60 bp, Artificial Sequence
  Description of Artificial Sequence: targeting sequence/synthetic sequence
gaaactctgggtaaagatataactcctatcaatgaagatattgaagagacaaatattgct

SEQ ID NO: 2206 - DNA, 60 bp, Artificial Sequence
  Description of Artificial Sequence: targeting sequence/synthetic sequence
actgagtctaggggctcagaatctggcatcttcacaaatacaaaggaatccagttctcat

SEQ ID NO: 2207 - DNA, 60 bp, Artificial Sequence
  Description of Artificial Sequence: targeting sequence/synthetic sequence
cctgagacaaccacttctggtggttgccactcacctgaggatacacccaaggacaatgct

SEQ ID NO: 2208 - DNA, 60 bp, Artificial Sequence
  Description of Artificial Sequence: targeting sequence/synthetic sequence
gggccaccacctggcccccctcgagtttccccagaccctcgggccgagctggacagcacc

SEQ ID NO: 2209 - DNA, 60 bp, Artificial Sequence
  Description of Artificial Sequence: targeting sequence/synthetic sequence
gtttgtgagagtgccccgggaccaatcaccatggaccttactggagatctggaagccctc

SEQ ID NO: 2210 - DNA, 60 bp, Artificial Sequence
  Description of Artificial Sequence: targeting sequence/synthetic sequence
gccatgcacgactacaaccaggccgagatgaagcagcgcgacaactgcaagatccgcatc

SEQ ID NO: 2211 - DNA, 60 bp, Artificial Sequence
  Description of Artificial Sequence: targeting sequence/synthetic sequence
accctggccgaggaacaccagggcggaaccgtgtgcaagcgggaccagagcgaccggggc

SEQ ID NO: 2212 - DNA, 60 bp, Artificial Sequence
  Description of Artificial Sequence: targeting sequence/synthetic sequence
aatctggcccggtgctcggagctgacccagtcgcaggcatcgctgcagtcggcgtcatct

SEQ ID NO: 2213 - DNA, 60 bp, Artificial Sequence
  Description of Artificial Sequence: targeting sequence/synthetic sequence
agcaccagctggagcaccagcaccgagaccggcgtgaagatgagctccgagttcgaggtg

SEQ ID NO: 2214 - DNA, 60 bp, Artificial Sequence
  Description of Artificial Sequence: targeting sequence/synthetic sequence
gagaccggccccgctggaccccctggtgctcctggtgctcctggtgcccctggccccgtt

SEQ ID NO: 2215 - DNA, 60 bp, Artificial Sequence
  Description of Artificial Sequence: targeting sequence/synthetic sequence
cggagagtggtcgagcgggagaagcgggccgtgggcatgggcgccttctttctgggcttc

SEQ ID NO: 2216 - DNA, 60 bp, Artificial Sequence
  Description of Artificial Sequence: targeting sequence/synthetic sequence
atcctgtctgacctcctgtgtggctaccccgagggaggtggctctcgggtgctctccttc

SEQ ID NO: 2217 - DNA, 60 bp, Artificial Sequence
  Description of Artificial Sequence: targeting sequence/synthetic sequence
aagccgcacacagatgaggacctggtgtacttggagcctagccccgacttctgtgagcag

SEQ ID NO: 2218 - DNA, 60 bp, Artificial Sequence
  Description of Artificial Sequence: targeting sequence/synthetic sequence
ggcaaaaggggcctttcccttggcccagaagaaaaaggaacaagtggagtgcagaagaaa

SEQ ID NO: 2219 - DNA, 60 bp, Artificial Sequence
  Description of Artificial Sequence: targeting sequence/synthetic sequence
aggagcacctccgagagcacagcggccctgggctgcctggtcaaggactacttccccgaa

SEQ ID NO: 2220 - DNA, 60 bp, Artificial Sequence
  Description of Artificial Sequence: targeting sequence/synthetic sequence
gctgcggacctgctggagaagatgctggagctagacgtggacaagcgcctgacggccgcg

SEQ ID NO: 2221 - DNA, 60 bp, Artificial Sequence
  Description of Artificial Sequence: targeting sequence/synthetic sequence
ttgctgccaccagcccgggagcagctgaacctgcgggagtcggccaccatcacgtgcctg

SEQ ID NO: 2222 - DNA, 60 bp, Artificial Sequence
  Description of Artificial Sequence: targeting sequence/synthetic sequence
ggggctgaggtgatgtcgcctggggcctcagtgagggtctcctgcaagacctctggttac

SEQ ID NO: 2223 - DNA, 60 bp, Artificial Sequence
  Description of Artificial Sequence: targeting sequence/synthetic sequence
aaggccgaccagtgctatgaagatgtgcgcgtctcacagaccacctgggacagtggcttc

SEQ ID NO: 2224 - DNA, 60 bp, Artificial Sequence
  Description of Artificial Sequence: targeting sequence/synthetic sequence
atattagaaggtgtccagtgtgaggtgcagctggtggagtctgggggaggcttggtacag

SEQ ID NO: 2225 - DNA, 60 bp, Artificial Sequence
  Description of Artificial Sequence: targeting sequence/synthetic sequence
aaggagttcgaccagagcaagttcgtggagaccgacttcagcgagaaggcctgcttcttt

SEQ ID NO: 2226 - DNA, 60 bp, Artificial Sequence
  Description of Artificial Sequence: targeting sequence/synthetic sequence
ctcggccctgtgacccaggagttctgggataacctggaaaaggagacagagggcctgagg

SEQ ID NO: 2227 - DNA, 60 bp, Artificial Sequence
  Description of Artificial Sequence: targeting sequence/synthetic sequence
cggggctggggcaacggctgcggcctgttcggcaagggcggaatcgtgacctgcgccatg

SEQ ID NO: 2228 - DNA, 60 bp, Artificial Sequence
  Description of Artificial Sequence: targeting sequence/synthetic sequence
aagaaggtgatgaactggaaagaaactttgacttttcctccagaagttcccatctctgag

SEQ ID NO: 2229 - DNA, 60 bp, Artificial Sequence
  Description of Artificial Sequence: targeting sequence/synthetic sequence
cccaccgccaccaagcggtggggcttccgggccggcgtgccccctaaggtggtcaactac

SEQ ID NO: 2230 - DNA, 60 bp, Artificial Sequence
  Description of Artificial Sequence: targeting sequence/synthetic sequence
ctggccaagcacgccgtgtccgagggcaccaaggcggtcaccaagtacaccagctcgaag

SEQ ID NO: 2231 - DNA, 60 bp, Artificial Sequence
  Description of Artificial Sequence: targeting sequence/synthetic sequence
ccagaggaggtgaagaagcgcaagaaggcggtgctcttctgcctgagtgaggacaagaag

SEQ ID NO: 2232 - DNA, 60 bp, Artificial Sequence
  Description of Artificial Sequence: targeting sequence/synthetic sequence
gtgcggcccgaggactgcagcattgggctcctgccccggaaccatgataagaatcgaagt

SEQ ID NO: 2233 - DNA, 60 bp, Artificial Sequence
  Description of Artificial Sequence: targeting sequence/synthetic sequence
tttggtggttttgactctacaaaggaccttcctgatgatgttataacctttgcaagaagt

SEQ ID NO: 2234 - DNA, 60 bp, Artificial Sequence
  Description of Artificial Sequence: targeting sequence/synthetic sequence
ctggagatcgccagcaacaatcagccccagaacgtggacagcgtgtgcagcggcaccctg

SEQ ID NO: 2235 - DNA, 60 bp, Artificial Sequence
  Description of Artificial Sequence: targeting sequence/synthetic sequence
ggccccgctggtcctcctggcttccctggtgctgttggtgctaagggtgaagctggtccc

SEQ ID NO: 2236 - DNA, 60 bp, Artificial Sequence
  Description of Artificial Sequence: targeting sequence/synthetic sequence
aaggtgctatctgtctgctctagtaataagccggctattgtagaagctggtggaatgcaa

SEQ ID NO: 2237 - DNA, 60 bp, Artificial Sequence
  Description of Artificial Sequence: targeting sequence/synthetic sequence
agcacctcagcccctctttccccaacctcgggcacaagcgtgggcatgtctaccttctcc

SEQ ID NO: 2238 - DNA, 60 bp, Artificial Sequence
  Description of Artificial Sequence: targeting sequence/synthetic sequence
cccagctccccgcctcactccacgggctcggtgaggccggtcagggcacagggcgagggc

SEQ ID NO: 2239 - DNA, 60 bp, Artificial Sequence
  Description of Artificial Sequence: targeting sequence/synthetic sequence
acccagcccactactgggtccttctgcccaggacctgttactctctgctctgacttggag

SEQ ID NO: 2240 - DNA, 60 bp, Artificial Sequence
  Description of Artificial Sequence: targeting sequence/synthetic sequence
tcaaagatcaactactcacagtgtgagcccattttggatgacaagcagaggaagtatgac

SEQ ID NO: 2241 - DNA, 60 bp, Artificial Sequence
  Description of Artificial Sequence: targeting sequence/synthetic sequence
ggcgtggccaccgacgtgcccagcgccaccaagcggtggggcttccggagcggcgtgccc

SEQ ID NO: 2242 - DNA, 60 bp, Artificial Sequence
  Description of Artificial Sequence: targeting sequence/synthetic sequence
actgttactgtccacgacttcccaggcaaaaaactagtgctgtccagtgagaagactgtg

SEQ ID NO: 2243 - DNA, 60 bp, Artificial Sequence
  Description of Artificial Sequence: targeting sequence/synthetic sequence
gagattgtgcagacaaatggagagacagaaccagctccactagagaccaaaccgccaccc

SEQ ID NO: 2244 - DNA, 60 bp, Artificial Sequence
  Description of Artificial Sequence: targeting sequence/synthetic sequence
atcgcccgggtggccgacaccatgcccagcggccccaccaacagcgaggccgtgcccgcc

SEQ ID NO: 2245 - DNA, 60 bp, Artificial Sequence
  Description of Artificial Sequence: targeting sequence/synthetic sequence
aaagtggaaagtgaactcattaaaccgattaaccctcgtctagatggatgtatacgaagc

SEQ ID NO: 2246 - DNA, 60 bp, Artificial Sequence
  Description of Artificial Sequence: targeting sequence/synthetic sequence
gatggcgtccgtggtctgaccggccccattggtcctcctggccctgctggtgcccctggt

SEQ ID NO: 2247 - DNA, 60 bp, Artificial Sequence
  Description of Artificial Sequence: targeting sequence/synthetic sequence
cccgcaggcccccctggccgagatggcatccctggacagcctggacttcccggacccccc

SEQ ID NO: 2248 - DNA, 60 bp, Artificial Sequence
  Description of Artificial Sequence: targeting sequence/synthetic sequence
ggcacccagacctacatctgcaacgtgaatcacaagcccagcaacaccaaggtggacaag

SEQ ID NO: 2249 - DNA, 60 bp, Artificial Sequence
  Description of Artificial Sequence: targeting sequence/synthetic sequence
cctttgggagaaaaaggagagaggggctaccctggaactccggggccaagaggagagcca

SEQ ID NO: 2250 - DNA, 60 bp, Artificial Sequence
  Description of Artificial Sequence: targeting sequence/synthetic sequence
aagacacacatgatgagcgccgtggaccgcagcttcacagaccagagcaccctgcaggag

SEQ ID NO: 2251 - DNA, 60 bp, Artificial Sequence
  Description of Artificial Sequence: targeting sequence/synthetic sequence
ccaggaacttgtcccagcaaaacatttggtggttttgactctacaaaggaccttcctgat

SEQ ID NO: 2252 - DNA, 60 bp, Artificial Sequence
  Description of Artificial Sequence: targeting sequence/synthetic sequence
actgctgcccctgctacagtcccgtctaccacggccccgttcttcagtagcagcacgctg

SEQ ID NO: 2253 - DNA, 60 bp, Artificial Sequence
  Description of Artificial Sequence: targeting sequence/synthetic sequence
accgccgctatcggccgggtggccgacaccgtgggcaccggccccaccaacagcgaggcc

SEQ ID NO: 2254 - DNA, 60 bp, Artificial Sequence
  Description of Artificial Sequence: targeting sequence/synthetic sequence
gcactcctgcagctggcccccgcccaggcccctgtctcccagcctgatgcccctggccac

SEQ ID NO: 2255 - DNA, 60 bp, Artificial Sequence
  Description of Artificial Sequence: targeting sequence/synthetic sequence
gcccaggaggatgtggaggccacctttccagtccatcagcctggcaactacagctgcagc

SEQ ID NO: 2256 - DNA, 60 bp, Artificial Sequence
  Description of Artificial Sequence: targeting sequence/synthetic sequence
agccccccgagccagggggaggtgccgcccggcccgctgcccgaggccgtgctcgccctg

SEQ ID NO: 2257 - DNA, 60 bp, Artificial Sequence
  Description of Artificial Sequence: targeting sequence/synthetic sequence
tgcgtcgaggataagcctggcactcattttacaccggttccacctactccgcccgacgcc

SEQ ID NO: 2258 - DNA, 60 bp, Artificial Sequence
  Description of Artificial Sequence: targeting sequence/synthetic sequence
gacaaacaagaaactgcgattaatatagggtattcctgccgattggtatcgcagaatatg

SEQ ID NO: 2259 - DNA, 60 bp, Artificial Sequence
  Description of Artificial Sequence: targeting sequence/synthetic sequence
cggtgccccctggccgctaaggaggaaagcatccccaagatccccgacggcctgctcatc

SEQ ID NO: 2260 - DNA, 60 bp, Artificial Sequence
  Description of Artificial Sequence: targeting sequence/synthetic sequence
tgtgatgagcactcaacagaatcacgatgctgtcgttaccctctaactgtggattttgaa

SEQ ID NO: 2261 - DNA, 60 bp, Artificial Sequence
  Description of Artificial Sequence: targeting sequence/synthetic sequence
ctggccaagcacgccgtgtccgagggcaccaaggcggtcaccaagtacaccagctccaag

SEQ ID NO: 2262 - DNA, 60 bp, Artificial Sequence
  Description of Artificial Sequence: targeting sequence/synthetic sequence
tctacaactccttactgcaatgatttgatgaagaatttggagtctagtcctctttcccgc

SEQ ID NO: 2263 - DNA, 60 bp, Artificial Sequence
  Description of Artificial Sequence: targeting sequence/synthetic sequence
acagaattcatacgagaaggcgacgatgaccggactgtgtgccgggagatccgccacaac

SEQ ID NO: 2264 - DNA, 60 bp, Artificial Sequence
  Description of Artificial Sequence: targeting sequence/synthetic sequence
gtatttgagtctaatccatctatccggaagaggcaacaaacacgtttgcttcggaaactt

SEQ ID NO: 2265 - DNA, 60 bp, Artificial Sequence
  Description of Artificial Sequence: targeting sequence/synthetic sequence
cctctagggagagagggtacgttctgtcaaacggcgtcaggccaggacggttctgggccg

SEQ ID NO: 2266 - DNA, 60 bp, Artificial Sequence
  Description of Artificial Sequence: targeting sequence/synthetic sequence
tgggagcagatccggctgaagcccggcagcaagaaaaagtaccggctgaagcacctggtg

SEQ ID NO: 2267 - DNA, 60 bp, Artificial Sequence
  Description of Artificial Sequence: targeting sequence/synthetic sequence
cctaccccatctccctcaactccacctaccccatctccctcatgctgccacccccgactg

SEQ ID NO: 2268 - DNA, 60 bp, Artificial Sequence
  Description of Artificial Sequence: targeting sequence/synthetic sequence
gcggagctttcgttttcagtgagccaggtggagcgcagtctacgggagggccactacgct

SEQ ID NO: 2269 - DNA, 60 bp, Artificial Sequence
  Description of Artificial Sequence: targeting sequence/synthetic sequence
attaagcacaccgtggagaatgggacagggcccagcagtgccccagacaggggcgtgaat

SEQ ID NO: 2270 - DNA, 60 bp, Artificial Sequence
  Description of Artificial Sequence: targeting sequence/synthetic sequence
cctacagagtctgattttctaatgcaagtggatggaaaacccaaatgttgcttctttaaa

SEQ ID NO: 2271 - DNA, 60 bp, Artificial Sequence
  Description of Artificial Sequence: targeting sequence/synthetic sequence
acaatagaaagctcttctgacgaagaggaagaccctcctgccaaaaggaaatgcatcttt

SEQ ID NO: 2272 - DNA, 60 bp, Artificial Sequence
  Description of Artificial Sequence: targeting sequence/synthetic sequence
attgagcaggaagccaatgagaaagcagaggaaatcgatgccaaggctgaggaagagttt

SEQ ID NO: 2273 - DNA, 60 bp, Artificial Sequence
  Description of Artificial Sequence: targeting sequence/synthetic sequence
cgggccagccccgccgacctggtctacttcgaaaagtctcccgacttctgcgagcgcgag

SEQ ID NO: 2274 - DNA, 60 bp, Artificial Sequence
  Description of Artificial Sequence: targeting sequence/synthetic sequence
tccacaggctgtgagatagattggaatgaaggaaagaatgtcactttgaaaaccatcaag

SEQ ID NO: 2275 - DNA, 60 bp, Artificial Sequence
  Description of Artificial Sequence: targeting sequence/synthetic sequence
gtgccccctaaggtggtcaactacgaggccggcgagtgggccgagaactgctacaacctg

SEQ ID NO: 2276 - DNA, 60 bp, Artificial Sequence
  Description of Artificial Sequence: targeting sequence/synthetic sequence
cccaaatcttgtgacacacctcccccatgcccacggtgcccagagcccaaatcttgtgac

SEQ ID NO: 2277 - DNA, 60 bp, Artificial Sequence
  Description of Artificial Sequence: targeting sequence/synthetic sequence
tccagcccctccactcagctgagtgcagacccatctcttgatgggcttccggcagcagaa

SEQ ID NO: 2278 - DNA, 60 bp, Artificial Sequence
  Description of Artificial Sequence: targeting sequence/synthetic sequence
gatgccttccaggactgggggcctggcagcatggcccacgtctctgtggtccctgtctcc

SEQ ID NO: 2279 - DNA, 60 bp, Artificial Sequence
  Description of Artificial Sequence: targeting sequence/synthetic sequence
cactgtgagaagggtttagttgaaaagagtgcaggggatgttgatacgcttgcttttgac

SEQ ID NO: 2280 - DNA, 60 bp, Artificial Sequence
  Description of Artificial Sequence: targeting sequence/synthetic sequence
gtggagagccacaggaagggctgcgacacgctggacatcagtgtccccccaggttccaga

SEQ ID NO: 2281 - DNA, 60 bp, Artificial Sequence
  Description of Artificial Sequence: targeting sequence/synthetic sequence
tttggagaactgtgccccaacaccgccccattgccccagctggtgactgaggccctgcag

SEQ ID NO: 2282 - DNA, 60 bp, Artificial Sequence
  Description of Artificial Sequence: targeting sequence/synthetic sequence
attcagcaaaacacagacgggagcggccaagtcagcattccaataattatccctcagacc

SEQ ID NO: 2283 - DNA, 60 bp, Artificial Sequence
  Description of Artificial Sequence: targeting sequence/synthetic sequence
gtgctggagatcccctacgtgaccaagcagggcgacagctggctgaagaaattcaccgag

SEQ ID NO: 2284 - DNA, 60 bp, Artificial Sequence
  Description of Artificial Sequence: targeting sequence/synthetic sequence
gtgttcagcaagatggagcaggtgtctggcgtgctgggcatcgaggactactcggtcagc

SEQ ID NO: 2285 - DNA, 60 bp, Artificial Sequence
  Description of Artificial Sequence: targeting sequence/synthetic sequence
actggaggggtgaagaaacctcatcgttacaggcctggtactgtggcgctccgtgaaatt

SEQ ID NO: 2286 - DNA, 60 bp, Artificial Sequence
  Description of Artificial Sequence: targeting sequence/synthetic sequence
atggaagggggagagctgtttgacaaagtggtggggaataaacgcctgaaagaagctacc

SEQ ID NO: 2287 - DNA, 60 bp, Artificial Sequence
  Description of Artificial Sequence: targeting sequence/synthetic sequence
ggtgctaagggagagcctggccctgttggtgttcaaggaccccctggccctgctggagag

SEQ ID NO: 2288 - DNA, 60 bp, Artificial Sequence
  Description of Artificial Sequence: targeting sequence/synthetic sequence
ctcgccgcactcctgcagctggcccccgcccaggcccctgtctcccagcctgatgcccct

SEQ ID NO: 2289 - DNA, 60 bp, Artificial Sequence
  Description of Artificial Sequence: targeting sequence/synthetic sequence
ccccctagcgcccacgccggcgccgacgatgtggtcgacagctccaagagcttcgtgatg

SEQ ID NO: 2290 - DNA, 60 bp, Artificial Sequence
  Description of Artificial Sequence: targeting sequence/synthetic sequence
ttcgggctgatggacacgaccctggaggaagtgttcctcaaggtgtcggaggaggatcag

SEQ ID NO: 2291 - DNA, 60 bp, Artificial Sequence
  Description of Artificial Sequence: targeting sequence/synthetic sequence
gctacgtctgccctggattcagaaagcaagtcagctgttcaagctgcactggagaaggcg

SEQ ID NO: 2292 - DNA, 60 bp, Artificial Sequence
  Description of Artificial Sequence: targeting sequence/synthetic sequence
cctaaaccactgaaaaaactacgctttgatattgaaggatcagatgaagcagatggaagt

SEQ ID NO: 2293 - DNA, 60 bp, Artificial Sequence
  Description of Artificial Sequence: targeting sequence/synthetic sequence
agagagggtacgttctgtcaaacggcgtcaggccaggacggttctgggccgtttctcgct

SEQ ID NO: 2294 - DNA, 60 bp, Artificial Sequence
  Description of Artificial Sequence: targeting sequence/synthetic sequence
agcctgctcctggacccccctaccaacgtgcgggactaccccaagtgcaagaccatccac

SEQ ID NO: 2295 - DNA, 60 bp, Artificial Sequence
  Description of Artificial Sequence: targeting sequence/synthetic sequence
gagacagccaccccagcgccggtggagaaatccccggctaagaagaaggcaactaagaag

SEQ ID NO: 2296 - DNA, 60 bp, Artificial Sequence
  Description of Artificial Sequence: targeting sequence/synthetic sequence
tacaaggactgccacttggcccaggtcccttctcataccgtcgtggcccgaagtatgggc

SEQ ID NO: 2297 - DNA, 60 bp, Artificial Sequence
  Description of Artificial Sequence: targeting sequence/synthetic sequence
gaaggccctttcagtcccaccacggtggtgtattctgcagaagaagaacccaccaaacca

SEQ ID NO: 2298 - DNA, 60 bp, Artificial Sequence
  Description of Artificial Sequence: targeting sequence/synthetic sequence
acaactccttactgcaatgatttgatgaagaatttggagtctagtcctctttcccgcatt

SEQ ID NO: 2299 - DNA, 60 bp, Artificial Sequence
  Description of Artificial Sequence: targeting sequence/synthetic sequence
ggaccccctggccctgctggagaggaaggaaagcgaggagctcgaggtgaacccggaccc

SEQ ID NO: 2300 - DNA, 60 bp, Artificial Sequence
  Description of Artificial Sequence: targeting sequence/synthetic sequence
ggagagacagaaccagctccactagagaccaaaccgccaccctctgggccacagcccacc

SEQ ID NO: 2301 - DNA, 60 bp, Artificial Sequence
  Description of Artificial Sequence: targeting sequence/synthetic sequence
acatgccaagaagccccaacagatgaatgcaagcctgtgaagtggtgtgcgctgagccac

SEQ ID NO: 2302 - DNA, 60 bp, Artificial Sequence
  Description of Artificial Sequence: targeting sequence/synthetic sequence
tgccggtgctcagaaggctaccaaggagatgggattcactgtcttgatattgatgagtgc

SEQ ID NO: 2303 - DNA, 60 bp, Artificial Sequence
  Description of Artificial Sequence: targeting sequence/synthetic sequence
gagagtaaagtgtttatttcaaatagtaccaattcatcaaacccttgtgagagaagaagt

SEQ ID NO: 2304 - DNA, 60 bp, Artificial Sequence
  Description of Artificial Sequence: targeting sequence/synthetic sequence
gagggctgccggcagatcctgggccagctgcagcccagcctgcagaccggcagcgaggaa

SEQ ID NO: 2305 - DNA, 60 bp, Artificial Sequence
  Description of Artificial Sequence: targeting sequence/synthetic sequence
gagaacgctgactcgcagatcaagttgtccatcaagcgcctggtcaccaccggtgtcctc

SEQ ID NO: 2306 - DNA, 60 bp, Artificial Sequence
  Description of Artificial Sequence: targeting sequence/synthetic sequence
gagtgtaagggcggctgcttcttccccttggctgacgatgtgacgccgacgaaacacgct

SEQ ID NO: 2307 - DNA, 60 bp, Artificial Sequence
  Description of Artificial Sequence: targeting sequence/synthetic sequence
gcaggggtcctctgtgaacttgctcaggacaaggaagctgcagaagctattgaagctgag

SEQ ID NO: 2308 - DNA, 60 bp, Artificial Sequence
  Description of Artificial Sequence: targeting sequence/synthetic sequence
accctggagttcaacagcaaggacttcatcgccgaggacatcaacgtgttcatgaaggac

SEQ ID NO: 2309 - DNA, 60 bp, Artificial Sequence
  Description of Artificial Sequence: targeting sequence/synthetic sequence
aagctgcggctcgccagccccccgagccagggggaggtgccgcccggcccgctgcccgag

SEQ ID NO: 2310 - DNA, 60 bp, Artificial Sequence
  Description of Artificial Sequence: targeting sequence/synthetic sequence
ctgcccctgccccctgacggcgtgcggggcttcccccggtgccggtacgtgcacaaggtg

SEQ ID NO: 2311 - DNA, 60 bp, Artificial Sequence
  Description of Artificial Sequence: targeting sequence/synthetic sequence
cccatcagccccggcgacctgaccatggtgatcacccccgactacgacgattgccacagc

SEQ ID NO: 2312 - DNA, 60 bp, Artificial Sequence
  Description of Artificial Sequence: targeting sequence/synthetic sequence
ggcacatgccaagaagccccaacagatgaatgcaagcctgtgaagtggtgtgcgctgagc

SEQ ID NO: 2313 - DNA, 60 bp, Artificial Sequence
  Description of Artificial Sequence: targeting sequence/synthetic sequence
tgcccagttccctcaactccacctaccccatctccctcaactccacctaccccatctccc

SEQ ID NO: 2314 - DNA, 60 bp, Artificial Sequence
  Description of Artificial Sequence: targeting sequence/synthetic sequence
aagtccgtgacatgccacgtgaagcactacacgaatcccagccaggatgtgactgtgccc

SEQ ID NO: 2315 - DNA, 60 bp, Artificial Sequence
  Description of Artificial Sequence: targeting sequence/synthetic sequence
agacacgagagccacacgtggagcctggaacgttctgagagcctgacttctgactcccag

SEQ ID NO: 2316 - DNA, 60 bp, Artificial Sequence
  Description of Artificial Sequence: targeting sequence/synthetic sequence
atcactgggaaagattgtcaagacattgccaataagggagctaaacagagcgggctttac

SEQ ID NO: 2317 - DNA, 60 bp, Artificial Sequence
  Description of Artificial Sequence: targeting sequence/synthetic sequence
tggcacagcgactacaaggtgaagggcctgtgcgacagcaacctgatcagcatggacatc

SEQ ID NO: 2318 - DNA, 60 bp, Artificial Sequence
  Description of Artificial Sequence: targeting sequence/synthetic sequence
agctccaacgcccagcggagctccgagttcaagatcgtggccagcgacagcaccgagagc

SEQ ID NO: 2319 - DNA, 60 bp, Artificial Sequence
  Description of Artificial Sequence: targeting sequence/synthetic sequence
ggacccgctggaccccctggccccattggtaatgttggtgctcctggagccaaaggtgct

SEQ ID NO: 2320 - DNA, 60 bp, Artificial Sequence
  Description of Artificial Sequence: targeting sequence/synthetic sequence
agaggagagagaggcttccctggtcttcctggcccctctggtgaacctggcaaacaaggt

SEQ ID NO: 2321 - DNA, 60 bp, Artificial Sequence
  Description of Artificial Sequence: targeting sequence/synthetic sequence
ttaataatctgtaaaaaagattctctagataaagaaaaagaaaaacatattgaccgagaa

SEQ ID NO: 2322 - DNA, 60 bp, Artificial Sequence
  Description of Artificial Sequence: targeting sequence/synthetic sequence
ctgggccacccggagagccccccacggaaacggctgaagagcaaagggagtgacaaagac

SEQ ID NO: 2323 - DNA, 60 bp, Artificial Sequence
  Description of Artificial Sequence: targeting sequence/synthetic sequence
agcgactacaaggtgaagggcctgtgcgacagcaacctgatcagcatggacatcaccttc

SEQ ID NO: 2324 - DNA, 60 bp, Artificial Sequence
  Description of Artificial Sequence: targeting sequence/synthetic sequence
gaaggaagcaaccctcctaaaccactgaaaaaactacgctttgatattgaaggatcagat

SEQ ID NO: 2325 - DNA, 60 bp, Artificial Sequence
  Description of Artificial Sequence: targeting sequence/synthetic sequence
ctgccccctgggcctatggtttcagaaccagctggcgctgctgcagaaggaaccttgcgg

SEQ ID NO: 2326 - DNA, 60 bp, Artificial Sequence
  Description of Artificial Sequence: targeting sequence/synthetic sequence
tctttgcctttcgatgaagattatataatagaaattaagccattcagcgacggaggagat

SEQ ID NO: 2327 - DNA, 60 bp, Artificial Sequence
  Description of Artificial Sequence: targeting sequence/synthetic sequence
caaagctccgtcctaaactggcaggactgtgaggtgccaagtcctcagtcttgcagccca

SEQ ID NO: 2328 - DNA, 60 bp, Artificial Sequence
  Description of Artificial Sequence: targeting sequence/synthetic sequence
aagctggtggaggaccggtggaacaagccccagaagacccggggccaccgggagagccac

SEQ ID NO: 2329 - DNA, 60 bp, Artificial Sequence
  Description of Artificial Sequence: targeting sequence/synthetic sequence
cggcagatcctgggccagctgcagcccagcctgcagaccggcagcgaggaatgccggagc

SEQ ID NO: 2330 - DNA, 60 bp, Artificial Sequence
  Description of Artificial Sequence: targeting sequence/synthetic sequence
tctgggggcacagcggccctgggctgcctggtcaaggactacttccccgaaccggtgacg

SEQ ID NO: 2331 - DNA, 60 bp, Artificial Sequence
  Description of Artificial Sequence: targeting sequence/synthetic sequence
accctgcaggtgagcgacgtggacaagctggtgtgccgggacaagctgagctccaccaac

SEQ ID NO: 2332 - DNA, 60 bp, Artificial Sequence
  Description of Artificial Sequence: targeting sequence/synthetic sequence
aaatgtgattccagtccagactcagccgaggacgtgcgcaaggtgtgccaagactgcccc

SEQ ID NO: 2333 - DNA, 60 bp, Artificial Sequence
  Description of Artificial Sequence: targeting sequence/synthetic sequence
ggagcttcaggtcccatgggtccccgaggtcccccaggtccccctggaaagaatggagat

SEQ ID NO: 2334 - DNA, 60 bp, Artificial Sequence
  Description of Artificial Sequence: targeting sequence/synthetic sequence
aaaccagagcttcctcaagatggcaccagcaccctcagagaaaatagcaaaccggaagaa

SEQ ID NO: 2335 - DNA, 60 bp, Artificial Sequence
  Description of Artificial Sequence: targeting sequence/synthetic sequence
tgccacccccgactgtcgctgcaccgaccggccctcgaggacctgctcttaggttcagaa

SEQ ID NO: 2336 - DNA, 60 bp, Artificial Sequence
  Description of Artificial Sequence: targeting sequence/synthetic sequence
gagaaaggtgtgcctggcatccctggcccacaaggttcacctggcttacctggagacaaa

SEQ ID NO: 2337 - DNA, 60 bp, Artificial Sequence
  Description of Artificial Sequence: targeting sequence/synthetic sequence
ccggtgggccgagtgcaccgcctgctccgtaaaggcaactacgcagagcgggttggggca

SEQ ID NO: 2338 - DNA, 60 bp, Artificial Sequence
  Description of Artificial Sequence: targeting sequence/synthetic sequence
aagttcggccggtgccccctggccgctaaggaggaaagcatccccaagatccccgacggc

SEQ ID NO: 2339 - DNA, 60 bp, Artificial Sequence
  Description of Artificial Sequence: targeting sequence/synthetic sequence
ctcatcgcaggctccaaggtgctgatactggacgagcccacctcgggcatggacgccatc

SEQ ID NO: 2340 - DNA, 60 bp, Artificial Sequence
  Description of Artificial Sequence: targeting sequence/synthetic sequence
cagcaccggagccaccggcagatggtggccaccacaaaccccctgatccggcacgagaac

SEQ ID NO: 2341 - DNA, 60 bp, Artificial Sequence
  Description of Artificial Sequence: targeting sequence/synthetic sequence
cagggcccgcagggagaaaagggtgaagcaggtcctcctggcccacctggaattgttata

SEQ ID NO: 2342 - DNA, 60 bp, Artificial Sequence
  Description of Artificial Sequence: targeting sequence/synthetic sequence
gagtggctgaaggtgaagatcctgcccgaggtgaaggagaagcacgagttcctgaaccgg

SEQ ID NO: 2343 - DNA, 60 bp, Artificial Sequence
  Description of Artificial Sequence: targeting sequence/synthetic sequence
cagcaccggagccaccggcagatggccaccgccaccaaccccctgatccggcacgagaac

SEQ ID NO: 2344 - DNA, 60 bp, Artificial Sequence
  Description of Artificial Sequence: targeting sequence/synthetic sequence
ttcaccatgaagctgtgcaaggacaccgaggacatcgagcagagcgccaacatccagggc

SEQ ID NO: 2345 - DNA, 60 bp, Artificial Sequence
  Description of Artificial Sequence: targeting sequence/synthetic sequence
caaattggaccaattggtgagaagggatcccgaggagaccctgggaccccaggagtgcct

SEQ ID NO: 2346 - DNA, 60 bp, Artificial Sequence
  Description of Artificial Sequence: targeting sequence/synthetic sequence
gacagccagcaccggagctaccggcagatggccaccacaaccaaccccctgatccggcac

SEQ ID NO: 2347 - DNA, 60 bp, Artificial Sequence
  Description of Artificial Sequence: targeting sequence/synthetic sequence
agccagcaccggagccaccggcagatggtggccaccacaaaccccctgatccggcacgag

SEQ ID NO: 2348 - DNA, 60 bp, Artificial Sequence
  Description of Artificial Sequence: targeting sequence/synthetic sequence
gcaccctctgctgcagcactggccaccccggacacgctgcagggccagtgctcagccttc

SEQ ID NO: 2349 - DNA, 60 bp, Artificial Sequence
  Description of Artificial Sequence: targeting sequence/synthetic sequence
tcccccggaccccactgcgcccaaaccgaagtcatagccacactcaagaatgggaagaaa

SEQ ID NO: 2350 - DNA, 60 bp, Artificial Sequence
  Description of Artificial Sequence: targeting sequence/synthetic sequence
gctggaggaacggcagaggtggcacccgacgcggtgcccaggagtggacgatcctgctgg

SEQ ID NO: 2351 - DNA, 60 bp, Artificial Sequence
  Description of Artificial Sequence: targeting sequence/synthetic sequence
cggcccgaggactgcagcattgggctcctgccccggaaccatgataagaatcgaagtatg

SEQ ID NO: 2352 - DNA, 60 bp, Artificial Sequence
  Description of Artificial Sequence: targeting sequence/synthetic sequence
tacgacttttggggtcatggaacattggtcaccgtttcctcagcctccaccaagggccca

SEQ ID NO: 2353 - DNA, 60 bp, Artificial Sequence
  Description of Artificial Sequence: targeting sequence/synthetic sequence
cggcagatggtgatcaccacaaaccccctgatccggcacgagaaccggatggtgctggcc

SEQ ID NO: 2354 - DNA, 60 bp, Artificial Sequence
  Description of Artificial Sequence: targeting sequence/synthetic sequence
aagaaagcaggacctcctggacccaatggccctccaggacccccaggacctccaggaccc

SEQ ID NO: 2355 - DNA, 60 bp, Artificial Sequence
  Description of Artificial Sequence: targeting sequence/synthetic sequence
ggcgtgtgcatctctcccgaggccatcgttactgcggacggagctgattttcctatggat

SEQ ID NO: 2356 - DNA, 60 bp, Artificial Sequence
  Description of Artificial Sequence: targeting sequence/synthetic sequence
ctgccaccagcccgggagcagctgaacctgcgggagtcggccaccatcacgtgcctggtg

SEQ ID NO: 2357 - DNA, 60 bp, Artificial Sequence
  Description of Artificial Sequence: targeting sequence/synthetic sequence
ggctgccagaagatcctgcgggtgctggaccccctggtgcccaccggcagcgagaacctg

SEQ ID NO: 2358 - DNA, 60 bp, Artificial Sequence
  Description of Artificial Sequence: targeting sequence/synthetic sequence
gaggacaccaacctatgcgccattcacgccaagcgagtgactatcatgcccaaggacatc

SEQ ID NO: 2359 - DNA, 60 bp, Artificial Sequence
  Description of Artificial Sequence: targeting sequence/synthetic sequence
aatctgaaagctgatacttcatctcctgaggaggaatataaggtggcctgcctgctcttg

SEQ ID NO: 2360 - DNA, 60 bp, Artificial Sequence
  Description of Artificial Sequence: targeting sequence/synthetic sequence
cggcgaaaactgggcgccgaagaggcggcgagggccgtggacgacggaggctgcagccgc

SEQ ID NO: 2361 - DNA, 60 bp, Artificial Sequence
  Description of Artificial Sequence: targeting sequence/synthetic sequence
cccgccatccccggcgccatgagccggagagtgatgaacgtgcacgaggccgtgaactgc

SEQ ID NO: 2362 - DNA, 60 bp, Artificial Sequence
  Description of Artificial Sequence: targeting sequence/synthetic sequence
cgggaacggaaggctgccttcaagggggattccggaggccccctgctgtgtaacaatgtg

SEQ ID NO: 2363 - DNA, 60 bp, Artificial Sequence
  Description of Artificial Sequence: targeting sequence/synthetic sequence
tggcaggagcagtatgacgggagggagggacgtactgtggtccactgcctaaatggggga

SEQ ID NO: 2364 - DNA, 60 bp, Artificial Sequence
  Description of Artificial Sequence: targeting sequence/synthetic sequence
cctcctcctcctcctattgctcgggctgtagtgccctcgaaacgtcagcgtgtatcagga

SEQ ID NO: 2365 - DNA, 60 bp, Artificial Sequence
  Description of Artificial Sequence: targeting sequence/synthetic sequence
ggtcagtgcgccctgcctgtggccctgtctggatctgggggacctcctgctctgaaccat

SEQ ID NO: 2366 - DNA, 60 bp, Artificial Sequence
  Description of Artificial Sequence: targeting sequence/synthetic sequence
cccaagcggagagtggtcgagcgggagaagcgggccgctctgggcgccctgttcctgggc

SEQ ID NO: 2367 - DNA, 60 bp, Artificial Sequence
  Description of Artificial Sequence: targeting sequence/synthetic sequence
cgaggtctaaagtatatacattcagctgacataattcacagggacctaaaacctagtaat

SEQ ID NO: 2368 - DNA, 60 bp, Artificial Sequence
  Description of Artificial Sequence: targeting sequence/synthetic sequence
atcattaccatgcctacagagtctgattttctaatgcaagtggatggaaaacccaaatgt

SEQ ID NO: 2369 - DNA, 60 bp, Artificial Sequence
  Description of Artificial Sequence: targeting sequence/synthetic sequence
attcgcaaactgccattccagcgtctagtccgtgagatcgcgcaggacttcaagactgat

SEQ ID NO: 2370 - DNA, 60 bp, Artificial Sequence
  Description of Artificial Sequence: targeting sequence/synthetic sequence
ccgcccccgtggtcccccagctccccgcctcactccacgggctcggtgaggccggtcagg

SEQ ID NO: 2371 - DNA, 60 bp, Artificial Sequence
  Description of Artificial Sequence: targeting sequence/synthetic sequence
accgagaccggcgtgaagatgagctccgagttcgaggtggagggcgccttcaagatgggc

SEQ ID NO: 2372 - DNA, 60 bp, Artificial Sequence
  Description of Artificial Sequence: targeting sequence/synthetic sequence
aaaaagacttcctttaagggggactctggaggccctcttgtgtgtaacaaggtggcccag

SEQ ID NO: 2373 - DNA, 60 bp, Artificial Sequence
  Description of Artificial Sequence: targeting sequence/synthetic sequence
attcgtaaactacctttccagcgcctggtgcgcgagattgcgcaggactttaaaacagac

SEQ ID NO: 2374 - DNA, 60 bp, Artificial Sequence
  Description of Artificial Sequence: targeting sequence/synthetic sequence
aaggatctaaaaaaatcattcaagagcccagaacccaggctctttactcctgaagaattc

SEQ ID NO: 2375 - DNA, 60 bp, Artificial Sequence
  Description of Artificial Sequence: targeting sequence/synthetic sequence
ctccgtgaaatccgccgctatcagaaatcgactgagctactgattcgcaagctaccattc

SEQ ID NO: 2376 - DNA, 60 bp, Artificial Sequence
  Description of Artificial Sequence: targeting sequence/synthetic sequence
ggagagcgtggtgctccaggccctgcagggcccagaggagctgctggagaacctggcaga

SEQ ID NO: 2377 - DNA, 60 bp, Artificial Sequence
  Description of Artificial Sequence: targeting sequence/synthetic sequence
ctgagctggggctccatgggcctggaggcagccacggccgtgggcctcagtgacttctgc

SEQ ID NO: 2378 - DNA, 60 bp, Artificial Sequence
  Description of Artificial Sequence: targeting sequence/synthetic sequence
aaggatggtaagaagcgcaagcgtagccgcaaggagagctattccgtgtacgtgtacaag

SEQ ID NO: 2379 - DNA, 60 bp, Artificial Sequence
  Description of Artificial Sequence: targeting sequence/synthetic sequence
gcaaatacccacagttccgccaaaccttgcgggcaacaatccattcacttgggaggagta

SEQ ID NO: 2380 - DNA, 60 bp, Artificial Sequence
  Description of Artificial Sequence: targeting sequence/synthetic sequence
acccaggtagcagagcagcttatcaacccttttggagaagatgatgatgattttgaaact

SEQ ID NO: 2381 - DNA, 60 bp, Artificial Sequence
  Description of Artificial Sequence: targeting sequence/synthetic sequence
cctgatagccagccctgctcccttgtgcctggcctggtaccaccagctcctagggctact

SEQ ID NO: 2382 - DNA, 60 bp, Artificial Sequence
  Description of Artificial Sequence: targeting sequence/synthetic sequence
tgtgagatagattggaatgaaggaaagaatgtcactttgaaaaccatcaagaagaaacag

SEQ ID NO: 2383 - DNA, 60 bp, Artificial Sequence
  Description of Artificial Sequence: targeting sequence/synthetic sequence
actcttgttcagcttctgggttcagatgatataaatgtggtcacctgtgcagctggaatt

SEQ ID NO: 2384 - DNA, 60 bp, Artificial Sequence
  Description of Artificial Sequence: targeting sequence/synthetic sequence
gggcagatcctgagcaagctgaagctcaccagtcccccagaagactatcctgagcccgag

SEQ ID NO: 2385 - DNA, 60 bp, Artificial Sequence
  Description of Artificial Sequence: targeting sequence/synthetic sequence
ggaatttccgtgcctggccccatgggtccctctggtcctcgtggtctccctggcccccct

SEQ ID NO: 2386 - DNA, 60 bp, Artificial Sequence
  Description of Artificial Sequence: targeting sequence/synthetic sequence
gcccagcaccggagccaccggcagatggccaccacaaccaaccccctgatccggcacgag

SEQ ID NO: 2387 - DNA, 60 bp, Artificial Sequence
  Description of Artificial Sequence: targeting sequence/synthetic sequence
ggccctgctggctttgctggcccccctggtgctgacggccaacctggtgctaaaggcgaa

SEQ ID NO: 2388 - DNA, 60 bp, Artificial Sequence
  Description of Artificial Sequence: targeting sequence/synthetic sequence
cagcaccggagccaccggcagatggccaccacaaccaaccccctgatccggcacgagaac

SEQ ID NO: 2389 - DNA, 60 bp, Artificial Sequence
  Description of Artificial Sequence: targeting sequence/synthetic sequence
ggtgagaacgctgactcgcagatcaagttgtccatcaagcgcctggtcaccaccggtgtc

SEQ ID NO: 2390 - DNA, 60 bp, Artificial Sequence
  Description of Artificial Sequence: targeting sequence/synthetic sequence
gtgccccctgacgccatgaaccggagaatcatgaacgtgcacgaggccgtgaactgcctg

SEQ ID NO: 2391 - DNA, 60 bp, Artificial Sequence
  Description of Artificial Sequence: targeting sequence/synthetic sequence
ctgaccttccagcagaatgcgtcctccatgtgtgtccccgatcaagacacagccatccgg

SEQ ID NO: 2392 - DNA, 60 bp, Artificial Sequence
  Description of Artificial Sequence: targeting sequence/synthetic sequence
agccccggctgctggatcattgacaacaatatctgcgaccagagctgccagaacttcatc

SEQ ID NO: 2393 - DNA, 60 bp, Artificial Sequence
  Description of Artificial Sequence: targeting sequence/synthetic sequence
cctgatctggcaacttctcccaccaaaagccctttcaagataccaccggtaactttcatc

SEQ ID NO: 2394 - DNA, 60 bp, Artificial Sequence
  Description of Artificial Sequence: targeting sequence/synthetic sequence
gtccgttgtgatcaatttctgccgaaaactgattccatcttatcggatccaacagaccac

SEQ ID NO: 2395 - DNA, 60 bp, Artificial Sequence
  Description of Artificial Sequence: targeting sequence/synthetic sequence
cacctggccagagccccgaatcacgctgtggtcacacggaaagataaggaagcttgcgtc

SEQ ID NO: 2396 - DNA, 60 bp, Artificial Sequence
  Description of Artificial Sequence: targeting sequence/synthetic sequence
gttcgaaaccccaagattctgattttagatgaggctacgtctgccctggattcagaaagc

SEQ ID NO: 2397 - DNA, 60 bp, Artificial Sequence
  Description of Artificial Sequence: targeting sequence/synthetic sequence
ccctctggtcctcgtggtctccctggcccccctggtgcacctggtccccaaggcttccaa

SEQ ID NO: 2398 - DNA, 60 bp, Artificial Sequence
  Description of Artificial Sequence: targeting sequence/synthetic sequence
agcctgtggccagatacagctgtcgcccctgggccaccacctggcccccctcgagtttcc

SEQ ID NO: 2399 - DNA, 60 bp, Artificial Sequence
  Description of Artificial Sequence: targeting sequence/synthetic sequence
gtggaaagtgaactcattaaaccgattaaccctcgtctagatggatgtatacgaagctgg

SEQ ID NO: 2400 - DNA, 60 bp, Artificial Sequence
  Description of Artificial Sequence: targeting sequence/synthetic sequence
gtgaccgccggcgtggccatcgccaagaccatccggctggagagcgaggtgaccgccatc

SEQ ID NO: 2401 - DNA, 60 bp, Artificial Sequence
  Description of Artificial Sequence: targeting sequence/synthetic sequence
gatcacaggggcctgaccttccagcagaatgcgtcctccatgtgtgtccccgatcaagac

SEQ ID NO: 2402 - DNA, 60 bp, Artificial Sequence
  Description of Artificial Sequence: targeting sequence/synthetic sequence
gatacagctgtcgcccctgggccaccacctggcccccctcgagtttccccagaccctcgg

SEQ ID NO: 2403 - DNA, 60 bp, Artificial Sequence
  Description of Artificial Sequence: targeting sequence/synthetic sequence
aagaaggacggcaggaagcgcaagcgcagccgcaaggagagctactccgtatacgtgtac

SEQ ID NO: 2404 - DNA, 60 bp, Artificial Sequence
  Description of Artificial Sequence: targeting sequence/synthetic sequence
gctcgaggcagtgatggtcaaccaggccctcctggtcctcctggaactgccggattccct

SEQ ID NO: 2405 - DNA, 60 bp, Artificial Sequence
  Description of Artificial Sequence: targeting sequence/synthetic sequence
gagtacaagtgcaaggtctccaacaaaggcctcccgtcctccatcgagaaaaccatctcc

SEQ ID NO: 2406 - DNA, 60 bp, Artificial Sequence
  Description of Artificial Sequence: targeting sequence/synthetic sequence
gcacagaccactcaacccacagccacggaggcacagaccactccactggcagccatggag

SEQ ID NO: 2407 - DNA, 60 bp, Artificial Sequence
  Description of Artificial Sequence: targeting sequence/synthetic sequence
ccgccaacagaattcatacgagaaggcgacgatgaccggactgtgtgccgggagatccgc

SEQ ID NO: 2408 - DNA, 60 bp, Artificial Sequence
  Description of Artificial Sequence: targeting sequence/synthetic sequence
gggctctccgacccgtgggcagactcagtgggagtgcgaccccgcaccacggagcgccac

SEQ ID NO: 2409 - DNA, 60 bp, Artificial Sequence
  Description of Artificial Sequence: targeting sequence/synthetic sequence
cgctgctcagatggctggagctttgatgctaccaccctggatgacaatggaaccatgctg

SEQ ID NO: 2410 - DNA, 60 bp, Artificial Sequence
  Description of Artificial Sequence: targeting sequence/synthetic sequence
cagtactgggagtaccagttccagcaccagcccagtcaggaggagtgtgaaggcagctcc

SEQ ID NO: 2411 - DNA, 60 bp, Artificial Sequence
  Description of Artificial Sequence: targeting sequence/synthetic sequence
cagcttctgggttcagatgatataaatgtggtcacctgtgcagctggaattctttctaac

SEQ ID NO: 2412 - DNA, 60 bp, Artificial Sequence
  Description of Artificial Sequence: targeting sequence/synthetic sequence
gtggaaggaagatgctctgaaagggatgccaggctgggcctctgtgcacgttccaatgac

SEQ ID NO: 2413 - DNA, 60 bp, Artificial Sequence
  Description of Artificial Sequence: targeting sequence/synthetic sequence
ggcgtccatgggttggcttcctccaatgaaacctttgatgggctggactgtccagctgca

SEQ ID NO: 2414 - DNA, 60 bp, Artificial Sequence
  Description of Artificial Sequence: targeting sequence/synthetic sequence
tgctgtgatgttgaagactcaactacctgttttaatgctaagggccctctactaaagaag

SEQ ID NO: 2415 - DNA, 60 bp, Artificial Sequence
  Description of Artificial Sequence: targeting sequence/synthetic sequence
ggccctacgggcaccggtgaatccaagtgtcctctgatggtcaaagttctagatgctgtc

SEQ ID NO: 2416 - DNA, 60 bp, Artificial Sequence
  Description of Artificial Sequence: targeting sequence/synthetic sequence
ggctgccagaagatcctgaaggtgctggcccccctggtgcccaccggcagcgagaacctg

SEQ ID NO: 2417 - DNA, 60 bp, Artificial Sequence
  Description of Artificial Sequence: targeting sequence/synthetic sequence
cctagtgttggtgctgctgctgggccagtggttcctccatgtccggggaggatcagacac

SEQ ID NO: 2418 - DNA, 60 bp, Artificial Sequence
  Description of Artificial Sequence: targeting sequence/synthetic sequence
gctgcagcactggccaccccggacacgctgcagggccagtgctcagccttcgtacagctc

SEQ ID NO: 2419 - DNA, 60 bp, Artificial Sequence
  Description of Artificial Sequence: targeting sequence/synthetic sequence
gaggggggtacgggaccgccagggcctcccctcaccaccaggaccaagtgtgcagatccg

SEQ ID NO: 2420 - DNA, 60 bp, Artificial Sequence
  Description of Artificial Sequence: targeting sequence/synthetic sequence
gctgagggctgtggcctgccacccaaggccctgcacactgccaccttccaggctctgcag

SEQ ID NO: 2421 - DNA, 60 bp, Artificial Sequence
  Description of Artificial Sequence: targeting sequence/synthetic sequence
agcggtgaacctggtgctcctggcagcaaaggagacactggtgctaagggagagcctggc

SEQ ID NO: 2422 - DNA, 60 bp, Artificial Sequence
  Description of Artificial Sequence: targeting sequence/synthetic sequence
ctggagaagatgcttgtattggactcagataagagaattacagcggcccaagcccttgca

SEQ ID NO: 2423 - DNA, 60 bp, Artificial Sequence
  Description of Artificial Sequence: targeting sequence/synthetic sequence
aatgatggtgctactggtgctgccgggccccctggtcccaccggccccgctggtcctcct

SEQ ID NO: 2424 - DNA, 60 bp, Artificial Sequence
  Description of Artificial Sequence: targeting sequence/synthetic sequence
ccgccatcaatcctggaccccccagaccaggtgcagtttgagaagtgtggcaagagggtg

SEQ ID NO: 2425 - DNA, 60 bp, Artificial Sequence
  Description of Artificial Sequence: targeting sequence/synthetic sequence
ataaaatcaaagaatatcttagtaaaaaagtgtgaaacttgtgccatagcggacttaggg

SEQ ID NO: 2426 - DNA, 60 bp, Artificial Sequence
  Description of Artificial Sequence: targeting sequence/synthetic sequence
gagagcagcccagacccggccacactcagtaaagaggacgcgcgcctcctgctggctgca

SEQ ID NO: 2427 - DNA, 60 bp, Artificial Sequence
  Description of Artificial Sequence: targeting sequence/synthetic sequence
ttgccacccaaaaagaagcgtctgcgacttgcagatatggagcactcctcaggggagtcc

SEQ ID NO: 2428 - DNA, 60 bp, Artificial Sequence
  Description of Artificial Sequence: targeting sequence/synthetic sequence
accaacagcaccctgaaggccaccgagatcgaccagctggtgtgccgggacaagctgagc

SEQ ID NO: 2429 - DNA, 60 bp, Artificial Sequence
  Description of Artificial Sequence: targeting sequence/synthetic sequence
ctcagagctgcaaatacccacagttccgccaaaccttgcgggcaacaatccattcacttg

SEQ ID NO: 2430 - DNA, 60 bp, Artificial Sequence
  Description of Artificial Sequence: targeting sequence/synthetic sequence
agctggggctccatgggcctggaggcagccacggccgtgggcctcagtgacttctgctcc

SEQ ID NO: 2431 - DNA, 60 bp, Artificial Sequence
  Description of Artificial Sequence: targeting sequence/synthetic sequence
gtatgtggctcagacggcgtaacctacagtacggaatgtgaactaaagaaagcacgctgt

SEQ ID NO: 2432 - DNA, 60 bp, Artificial Sequence
  Description of Artificial Sequence: targeting sequence/synthetic sequence
cacaggaagggctgcgacacgctggacatcagtgtccccccaggttccagaaacctgccc

SEQ ID NO: 2433 - DNA, 60 bp, Artificial Sequence
  Description of Artificial Sequence: targeting sequence/synthetic sequence
tcctcacacatcctcaccccgacccgcttcctggatgacctgaaggcactggacaagaag

SEQ ID NO: 2434 - DNA, 60 bp, Artificial Sequence
  Description of Artificial Sequence: targeting sequence/synthetic sequence
taccagaacctgtctccagtgggctctggcgcctatggctctgtgtgtgctgcttttgac

SEQ ID NO: 2435 - DNA, 60 bp, Artificial Sequence
  Description of Artificial Sequence: targeting sequence/synthetic sequence
tccacagtcacgccggcccccagtgatgctagtggaatttgggaacctggatcccaggtg

SEQ ID NO: 2436 - DNA, 60 bp, Artificial Sequence
  Description of Artificial Sequence: targeting sequence/synthetic sequence
aggtcccccggaccccactgcgcccaaaccgaagtcatagccacactcaagaatgggaag

SEQ ID NO: 2437 - DNA, 60 bp, Artificial Sequence
  Description of Artificial Sequence: targeting sequence/synthetic sequence
ggccaagggaccacggtcaccgtctcctcagcacccaccaaggctccggatgtgttcccc

SEQ ID NO: 2438 - DNA, 60 bp, Artificial Sequence
  Description of Artificial Sequence: targeting sequence/synthetic sequence
atgcaaacacgtgaagttctgatgaagttatctggaactatagagtgtgaagggcccaac

SEQ ID NO: 2439 - DNA, 60 bp, Artificial Sequence
  Description of Artificial Sequence: targeting sequence/synthetic sequence
cctactcgcacggccgagccggctgaaagcagcgtgcctccagtcaccagcattgggatt

SEQ ID NO: 2440 - DNA, 60 bp, Artificial Sequence
  Description of Artificial Sequence: targeting sequence/synthetic sequence
aagatgagctccgagttcgaggtggagggcgccttcaagatgggcggagagttcagcctg

SEQ ID NO: 2441 - DNA, 60 bp, Artificial Sequence
  Description of Artificial Sequence: targeting sequence/synthetic sequence
cgcgaccatatgaaaagcgtcattccatccgatggtcccagtgttgcttgtgtgaagaaa

SEQ ID NO: 2442 - DNA, 60 bp, Artificial Sequence
  Description of Artificial Sequence: targeting sequence/synthetic sequence
tttgagccatcagaagcagagatctcccacacccaaaaggccacactggtgtgcctggcc

SEQ ID NO: 2443 - DNA, 60 bp, Artificial Sequence
  Description of Artificial Sequence: targeting sequence/synthetic sequence
ggcagcggcggaacctacgccctgagcctgagccagtacaacatgggcatcaacatcgag

SEQ ID NO: 2444 - DNA, 60 bp, Artificial Sequence
  Description of Artificial Sequence: targeting sequence/synthetic sequence
agccacaggaagggctgcgacacgctggacatcagtgtccccccaggttccagaaacctg

SEQ ID NO: 2445 - DNA, 60 bp, Artificial Sequence
  Description of Artificial Sequence: targeting sequence/synthetic sequence
agcctgaacgaggaacaggacaagcggctggtgtgcaagcacagcatggtggaccggggc

SEQ ID NO: 2446 - DNA, 60 bp, Artificial Sequence
  Description of Artificial Sequence: targeting sequence/synthetic sequence
caggggaccgtggtctgttccctggacgggctgttcccagtctcggaggcccaggtccac

SEQ ID NO: 2447 - DNA, 60 bp, Artificial Sequence
  Description of Artificial Sequence: targeting sequence/synthetic sequence
cccggagacggcggcactggccgccctgggccacccctcatcagccgcaccaaatgcgca

SEQ ID NO: 2448 - DNA, 60 bp, Artificial Sequence
  Description of Artificial Sequence: targeting sequence/synthetic sequence
cagaagtgcctggctgttgggatggtcaaagaagtggttcgcacagacagtttaaaaggc

SEQ ID NO: 2449 - DNA, 60 bp, Artificial Sequence
  Description of Artificial Sequence: targeting sequence/synthetic sequence
aagaaagagtttccctatccatgctatgacccagccacacgcgaaggtgaccttaaactt

SEQ ID NO: 2450 - DNA, 60 bp, Artificial Sequence
  Description of Artificial Sequence: targeting sequence/synthetic sequence
acgcaaggcgaagaccagtactatctgcgggtcaccacggtggcttcccacacttctgac

SEQ ID NO: 2451 - DNA, 60 bp, Artificial Sequence
  Description of Artificial Sequence: targeting sequence/synthetic sequence
ggcatcctgtctgacctcctgtgtggctaccccgagggaggtggctctcgggtgctctcc

SEQ ID NO: 2452 - DNA, 60 bp, Artificial Sequence
  Description of Artificial Sequence: targeting sequence/synthetic sequence
gaccaggacttctaccagaagtttgccacaggcagtgtgcccatcccctggcagaacgag

SEQ ID NO: 2453 - DNA, 60 bp, Artificial Sequence
  Description of Artificial Sequence: targeting sequence/synthetic sequence
aagaagcggcgaaaactgggcgccgaagaggcggcgagggccgtggacgacggaggctgc

SEQ ID NO: 2454 - DNA, 60 bp, Artificial Sequence
  Description of Artificial Sequence: targeting sequence/synthetic sequence
ggcatccctggtgtcaaaggagaagcaggtcttcctgggactcctggccccacaggccca

SEQ ID NO: 2455 - DNA, 60 bp, Artificial Sequence
  Description of Artificial Sequence: targeting sequence/synthetic sequence
aagggatcccgaggagaccctgggaccccaggagtgcctggaaaggacgggcaggcagga

SEQ ID NO: 2456 - DNA, 60 bp, Artificial Sequence
  Description of Artificial Sequence: targeting sequence/synthetic sequence
gatccaggtgagatacttggccatgtgcccgggatgctgttgaaaggtgaaagaggattt

SEQ ID NO: 2457 - DNA, 60 bp, Artificial Sequence
  Description of Artificial Sequence: targeting sequence/synthetic sequence
aaggcctgcgacgtgctggagatcccctacgtgaccaagcagggcgacagctggctgaag

SEQ ID NO: 2458 - DNA, 60 bp, Artificial Sequence
  Description of Artificial Sequence: targeting sequence/synthetic sequence
actgctgacatgcaaacacgtgaagttctgatgaagttatctggaactatagagtgtgaa

SEQ ID NO: 2459 - DNA, 60 bp, Artificial Sequence
  Description of Artificial Sequence: targeting sequence/synthetic sequence
tctacacaagaggagatcaaaaagagaaagaaagcagttctcttctgtttaagcgatgac

SEQ ID NO: 2460 - DNA, 60 bp, Artificial Sequence
  Description of Artificial Sequence: targeting sequence/synthetic sequence
cagagagaccggaaggctgagcactggaaacataagaaggaagaatctggccgggaaagg

SEQ ID NO: 2461 - DNA, 60 bp, Artificial Sequence
  Description of Artificial Sequence: targeting sequence/synthetic sequence
cactcggatgcagttccggatgccccaatccttcctgtctcccctatctgggaacctcct

SEQ ID NO: 2462 - DNA, 60 bp, Artificial Sequence
  Description of Artificial Sequence: targeting sequence/synthetic sequence
ggctgcttcattgccattgacaccatgcttgacatggccgagaatgaaggggtggtggac

SEQ ID NO: 2463 - DNA, 60 bp, Artificial Sequence
  Description of Artificial Sequence: targeting sequence/synthetic sequence
ggaggtgaaggtggggcaggagcagatgaggaaaaggagcagtcgcacagacctttcctc

SEQ ID NO: 2464 - DNA, 60 bp, Artificial Sequence
  Description of Artificial Sequence: targeting sequence/synthetic sequence
gagatcccccacgtgatgcggcagggcgacggctggatgaagaaattcaccgaggcctgc

SEQ ID NO: 2465 - DNA, 60 bp, Artificial Sequence
  Description of Artificial Sequence: targeting sequence/synthetic sequence
cgagtgcaccgcctgctccgcaaaggcaactactccgagcgcgtcggggctggcgcgccg

SEQ ID NO: 2466 - DNA, 60 bp, Artificial Sequence
  Description of Artificial Sequence: targeting sequence/synthetic sequence
ggcaaccccgccaagcacgacctggacatcaagcccaccgtgatcagccaccggctgcac

SEQ ID NO: 2467 - DNA, 60 bp, Artificial Sequence
  Description of Artificial Sequence: targeting sequence/synthetic sequence
accgacgacacggccgtgtattattgtgttagagatcttgagggggctggtaaatacgac

SEQ ID NO: 2468 - DNA, 60 bp, Artificial Sequence
  Description of Artificial Sequence: targeting sequence/synthetic sequence
actccctcctggaccctgtctccctttcaggatgctgcctcctcttcttcctcttcttcc

SEQ ID NO: 2469 - DNA, 60 bp, Artificial Sequence
  Description of Artificial Sequence: targeting sequence/synthetic sequence
ctgcagaccggcaccaaggagctgatcagcctgcacaacaccgtggccaccctgtactgc

SEQ ID NO: 2470 - DNA, 60 bp, Artificial Sequence
  Description of Artificial Sequence: targeting sequence/synthetic sequence
ggaccaggaagtgatgggaaaccagggcctcccggaagtcaaggagaaagtggtcgacca

SEQ ID NO: 2471 - DNA, 60 bp, Artificial Sequence
  Description of Artificial Sequence: targeting sequence/synthetic sequence
ccgccgccgtcggaggagctggccctgaacgagctggtgacgctgacgtgcctggcacgt

SEQ ID NO: 2472 - DNA, 60 bp, Artificial Sequence
  Description of Artificial Sequence: targeting sequence/synthetic sequence
gagcgggcccggtgcaccgtggccgacaccatgcggaccggccccagcaacagcgccagc

SEQ ID NO: 2473 - DNA, 60 bp, Artificial Sequence
  Description of Artificial Sequence: targeting sequence/synthetic sequence
gaaaaaaacgggtcatgcttcttgcggacggatcagctggatggggagacggactggaag

SEQ ID NO: 2474 - DNA, 60 bp, Artificial Sequence
  Description of Artificial Sequence: targeting sequence/synthetic sequence
cttcacgattctactccctcctggaccctgtctccctttcaggatgctgcctcctcttct

SEQ ID NO: 2475 - DNA, 60 bp, Artificial Sequence
  Description of Artificial Sequence: targeting sequence/synthetic sequence
ccaggtgttccaggagctaaaggcgaagatggcaaggatggatcacctggagaacctggt

SEQ ID NO: 2476 - DNA, 60 bp, Artificial Sequence
  Description of Artificial Sequence: targeting sequence/synthetic sequence
cggccaggcacccaggccctggagccaggggcggccaccgaggctgagggcttccctggg

SEQ ID NO: 2477 - DNA, 60 bp, Artificial Sequence
  Description of Artificial Sequence: targeting sequence/synthetic sequence
gtcgagtgcccaccgtgcccagcaccacctgtggcaggaccgtcagtcttcctcttcccc

SEQ ID NO: 2478 - DNA, 60 bp, Artificial Sequence
  Description of Artificial Sequence: targeting sequence/synthetic sequence
agcggcggaaagctggacgagtgggagaagatccagctgcggcccggcggaaagaaacgg

SEQ ID NO: 2479 - DNA, 60 bp, Artificial Sequence
  Description of Artificial Sequence: targeting sequence/synthetic sequence
gaacagctcggccctgtgacccaggagttctgggataacctggaaaaggagacagagggc

SEQ ID NO: 2480 - DNA, 60 bp, Artificial Sequence
  Description of Artificial Sequence: targeting sequence/synthetic sequence
tgccggcagatcctgggccagctgcagcccgccctgcagaccggcagcgaggaactgaag

SEQ ID NO: 2481 - DNA, 60 bp, Artificial Sequence
  Description of Artificial Sequence: targeting sequence/synthetic sequence
cctcctcctattgctcgggctgtagtgccctcgaaacgtcagcgtgtatcaggaaacact

SEQ ID NO: 2482 - DNA, 60 bp, Artificial Sequence
  Description of Artificial Sequence: targeting sequence/synthetic sequence
gtctgctctagtaataagccggctattgtagaagctggtggaatgcaagctttaggactt

SEQ ID NO: 2483 - DNA, 60 bp, Artificial Sequence
  Description of Artificial Sequence: targeting sequence/synthetic sequence
gagacccggggagtcctcaaagtcttcctggagaacgtgatccgtgacgcggtgacttac

SEQ ID NO: 2484 - DNA, 60 bp, Artificial Sequence
  Description of Artificial Sequence: targeting sequence/synthetic sequence
acagctacgtgcacagcgaagaatgcacatctggtgaccagaaaccaagacatccacgtt

SEQ ID NO: 2485 - DNA, 60 bp, Artificial Sequence
  Description of Artificial Sequence: targeting sequence/synthetic sequence
gagaagatccggctgcggcccggcggacggaagaaataccggctgaagcacctggtgtgg

SEQ ID NO: 2486 - DNA, 60 bp, Artificial Sequence
  Description of Artificial Sequence: targeting sequence/synthetic sequence
agggctatagtagacgtccacttcgatcctacgacggccttccgagcaccggacgtcgct

SEQ ID NO: 2487 - DNA, 60 bp, Artificial Sequence
  Description of Artificial Sequence: targeting sequence/synthetic sequence
tctaccaaaaaaagggaaagggatgaagaaaatcaagaaatgtcttcatgcaaatcagca

SEQ ID NO: 2488 - DNA, 60 bp, Artificial Sequence
  Description of Artificial Sequence: targeting sequence/synthetic sequence
gagattccggaggctcagatccatgaaggcttccaggaactcctccgtaccctcaaccag

SEQ ID NO: 2489 - DNA, 60 bp, Artificial Sequence
  Description of Artificial Sequence: targeting sequence/synthetic sequence
accggctttgtggacatccctaagcaggagaaggccctgatgaaggcagttgcaactgtg

SEQ ID NO: 2490 - DNA, 60 bp, Artificial Sequence
  Description of Artificial Sequence: targeting sequence/synthetic sequence
ctttcccttggcccagaagaaaaaggaacaagtggagtgcagaagaaaatctgtactgag

SEQ ID NO: 2491 - DNA, 60 bp, Artificial Sequence
  Description of Artificial Sequence: targeting sequence/synthetic sequence
gggggtggagatgtagaagatgtgacgccgcggcccggcgggtgccagattagcggacgc

SEQ ID NO: 2492 - DNA, 60 bp, Artificial Sequence
  Description of Artificial Sequence: targeting sequence/synthetic sequence
aagctgaccgaggaccggtggaacaagccccagaagaccaagggccggagaggcagccac

SEQ ID NO: 2493 - DNA, 60 bp, Artificial Sequence
  Description of Artificial Sequence: targeting sequence/synthetic sequence
accgacgtgcccaccgccaccaagcggtggggcttccgggccggcgtgccccctaaggtg

SEQ ID NO: 2494 - DNA, 60 bp, Artificial Sequence
  Description of Artificial Sequence: targeting sequence/synthetic sequence
ggtggctctccaggaatcacaggctctaagggtgatatggggcctccaggagttccagga

SEQ ID NO: 2495 - DNA, 60 bp, Artificial Sequence
  Description of Artificial Sequence: targeting sequence/synthetic sequence
tctgaggctggccctacgggcaccggtgaatccaagtgtcctctgatggtcaaagttcta

SEQ ID NO: 2496 - DNA, 60 bp, Artificial Sequence
  Description of Artificial Sequence: targeting sequence/synthetic sequence
gtggagctggagcctaccgaccaggacttctaccagaagtttgccacaggcagtgtgccc

SEQ ID NO: 2497 - DNA, 60 bp, Artificial Sequence
  Description of Artificial Sequence: targeting sequence/synthetic sequence
gagaaaatgatggagtcaagttttgtcggcccccagtcattccctgaggtcccttctcct

SEQ ID NO: 2498 - DNA, 60 bp, Artificial Sequence
  Description of Artificial Sequence: targeting sequence/synthetic sequence
gattcagcagttgatatggacgaatgcaaagaacccgatgtctgtaaacatggacagtgc

SEQ ID NO: 2499 - DNA, 60 bp, Artificial Sequence
  Description of Artificial Sequence: targeting sequence/synthetic sequence
aagaagcgcaagcgcggccgcaaggagagctattctatctacgtgtacaaggtgctgaag

SEQ ID NO: 2500 - DNA, 60 bp, Artificial Sequence
  Description of Artificial Sequence: targeting sequence/synthetic sequence
gagcttcctcaagatggcaccagcaccctcagagaaaatagcaaaccggaagaaagccat

SEQ ID NO: 2501 - DNA, 60 bp, Artificial Sequence
  Description of Artificial Sequence: targeting sequence/synthetic sequence
gaagcctacgagtgtaagggcggctgcttcttccccttggctgacgatgtgacgccgacg

SEQ ID NO: 2502 - DNA, 60 bp, Artificial Sequence
  Description of Artificial Sequence: targeting sequence/synthetic sequence
gatgtgtccaagaaggtcacggagctcctgaggaccttctgtgagagcaagaggctgacc

SEQ ID NO: 2503 - DNA, 60 bp, Artificial Sequence
  Description of Artificial Sequence: targeting sequence/synthetic sequence
agccagacggggttagcggagcaatgcgcaggaataaggaagcgacctgcaaccgacgat

SEQ ID NO: 2504 - DNA, 60 bp, Artificial Sequence
  Description of Artificial Sequence: targeting sequence/synthetic sequence
atcattttcggccccggccccgtgctgagcgacaacttcaccgacagcatgatcatgaac

SEQ ID NO: 2505 - DNA, 60 bp, Artificial Sequence
  Description of Artificial Sequence: targeting sequence/synthetic sequence
ggcgccgacggtggcccctcaggctttccggagcgcggcggcaacgggagcctccctgga

SEQ ID NO: 2506 - DNA, 60 bp, Artificial Sequence
  Description of Artificial Sequence: targeting sequence/synthetic sequence
cagccaggcattggatttccagggccccccggccccaaaggtgttgacggcttacctgga

SEQ ID NO: 2507 - DNA, 60 bp, Artificial Sequence
  Description of Artificial Sequence: targeting sequence/synthetic sequence
tgcgggtttggtgccgtttgcgagcccaacgcggaaggacctggccgagcctcgtgtgtc

SEQ ID NO: 2508 - DNA, 60 bp, Artificial Sequence
  Description of Artificial Sequence: targeting sequence/synthetic sequence
tgcgtggacaaactcaccaaggtctacaaggacgacaagaagctggccctgaacaagctg

SEQ ID NO: 2509 - DNA, 60 bp, Artificial Sequence
  Description of Artificial Sequence: targeting sequence/synthetic sequence
aaacggcctcatgtatttgagtctaatccatctatccggaagaggcaacaaacacgtttg

SEQ ID NO: 2510 - DNA, 60 bp, Artificial Sequence
  Description of Artificial Sequence: targeting sequence/synthetic sequence
acccctactcgcacggccgagccggctgaaagcagcgtgcctccagtcaccagcattggg

SEQ ID NO: 2511 - DNA, 60 bp, Artificial Sequence
  Description of Artificial Sequence: targeting sequence/synthetic sequence
ggcagtaccagtgagacccctcagcctcctcggaagaaaagggcccgggtagatcctact

SEQ ID NO: 2512 - DNA, 60 bp, Artificial Sequence
  Description of Artificial Sequence: targeting sequence/synthetic sequence
ctgaccgaggaccggtggaacaagccccagaagaccaagggccaccggagaagccacacc

SEQ ID NO: 2513 - DNA, 60 bp, Artificial Sequence
  Description of Artificial Sequence: targeting sequence/synthetic sequence
ggctccggcaagcccattgacaaggggccagtggtcatggcggaggactttctggatatc

SEQ ID NO: 2514 - DNA, 60 bp, Artificial Sequence
  Description of Artificial Sequence: targeting sequence/synthetic sequence
aaggccgacgagctggagaagatccggctgcggcccggcggaaagaaaaagtacaagctg

SEQ ID NO: 2515 - DNA, 60 bp, Artificial Sequence
  Description of Artificial Sequence: targeting sequence/synthetic sequence
ggtgttacaggattggtgggtatacctggacctccaggtattcctgggtttgacggtgcc

SEQ ID NO: 2516 - DNA, 60 bp, Artificial Sequence
  Description of Artificial Sequence: targeting sequence/synthetic sequence
atctcccctccagatgcggcctcagctgctccactccgaacaatcactgctgacactttc

SEQ ID NO: 2517 - DNA, 60 bp, Artificial Sequence
  Description of Artificial Sequence: targeting sequence/synthetic sequence
atctcatccaaggccatggggatcatgaattccttcgtcaacgacatcttcgagcgcatc

SEQ ID NO: 2518 - DNA, 60 bp, Artificial Sequence
  Description of Artificial Sequence: targeting sequence/synthetic sequence
tccccggagcctcccgacaccacctccccggagcctcccaacaccacctccccggagtct

SEQ ID NO: 2519 - DNA, 60 bp, Artificial Sequence
  Description of Artificial Sequence: targeting sequence/synthetic sequence
ggcgacctggccgtggaggtgagccccggctgctggatcattgacaacaatatctgcgac

SEQ ID NO: 2520 - DNA, 60 bp, Artificial Sequence
  Description of Artificial Sequence: targeting sequence/synthetic sequence
cactcaacagaatcacgatgctgtcgttaccctctaactgtggattttgaagcttttgga

SEQ ID NO: 2521 - DNA, 60 bp, Artificial Sequence
  Description of Artificial Sequence: targeting sequence/synthetic sequence
gtgctgaaggtgttcctggagaacgtgatccgggacgccgtgacctatacagagcacgcc

SEQ ID NO: 2522 - DNA, 60 bp, Artificial Sequence
  Description of Artificial Sequence: targeting sequence/synthetic sequence
gagttgctgattcggaagctgccgttccagcgcctggtgcgagaaatcgcccaagacttc

SEQ ID NO: 2523 - DNA, 60 bp, Artificial Sequence
  Description of Artificial Sequence: targeting sequence/synthetic sequence
gacaccaaatcttactggaaggcacttggcatctccccattccatgagcatgcagaggtg

SEQ ID NO: 2524 - DNA, 60 bp, Artificial Sequence
  Description of Artificial Sequence: targeting sequence/synthetic sequence
gagtctcagtctgatgacccacacttccatgagaagaagcagatcccctgtgtggtctcc

SEQ ID NO: 2525 - DNA, 60 bp, Artificial Sequence
  Description of Artificial Sequence: targeting sequence/synthetic sequence
aagaacaactaccttcgggaagaagagtgcattctagcctgtcggggtgtgcaaggcccc

SEQ ID NO: 2526 - DNA, 60 bp, Artificial Sequence
  Description of Artificial Sequence: targeting sequence/synthetic sequence
gggcttcagtttcccgtaggccgagtgcatcgcctgctccgcaaaggcaactatgcggag

SEQ ID NO: 2527 - DNA, 60 bp, Artificial Sequence
  Description of Artificial Sequence: targeting sequence/synthetic sequence
cacacgtggagcctggaacgttctgagagcctgacttctgactcccagtcggggatcatg

SEQ ID NO: 2528 - DNA, 60 bp, Artificial Sequence
  Description of Artificial Sequence: targeting sequence/synthetic sequence
ggcccagaagaaaaaggaacaagtggagtgcagaagaaaatctgtactgagagacttggg

SEQ ID NO: 2529 - DNA, 60 bp, Artificial Sequence
  Description of Artificial Sequence: targeting sequence/synthetic sequence
cgagacataaaatcaaagaatatcttagtaaaaaagtgtgaaacttgtgccatagcggac

SEQ ID NO: 2530 - DNA, 60 bp, Artificial Sequence
  Description of Artificial Sequence: targeting sequence/synthetic sequence
accctcacgatccagactcatccctaccgcacctgtgaccctgtggagatgagctacccc

SEQ ID NO: 2531 - DNA, 60 bp, Artificial Sequence
  Description of Artificial Sequence: targeting sequence/synthetic sequence
aacctggagaaaaacagcaccaagcaggagatcctggctgctcttgagaaaggctgcagc

SEQ ID NO: 2532 - DNA, 60 bp, Artificial Sequence
  Description of Artificial Sequence: targeting sequence/synthetic sequence
gggcccagccacccccggctggacccagaggagatccagatggcagattatatttccaag

SEQ ID NO: 2533 - DNA, 60 bp, Artificial Sequence
  Description of Artificial Sequence: targeting sequence/synthetic sequence
ggaacttgtcccagcaaaacatttggtggttttgactctacaaaggaccttcctgatgat

SEQ ID NO: 2534 - DNA, 60 bp, Artificial Sequence
  Description of Artificial Sequence: targeting sequence/synthetic sequence
gaaatgacagtttttcgggaaccgactgctatttcagcaatggagctttccactaagcag

SEQ ID NO: 2535 - DNA, 60 bp, Artificial Sequence
  Description of Artificial Sequence: targeting sequence/synthetic sequence
cttgctgtaaccttcccaggaccaggagaagatgggctgaatccgtttttagaggtcaag

SEQ ID NO: 2536 - DNA, 60 bp, Artificial Sequence
  Description of Artificial Sequence: targeting sequence/synthetic sequence
atggcggtactggcggctggcgccctgacgcagccggtgcctcccgcagatcccgcgggc

SEQ ID NO: 2537 - DNA, 60 bp, Artificial Sequence
  Description of Artificial Sequence: targeting sequence/synthetic sequence
tgtgcagcagaagagccccccaggtttatcaaagaacccaaggaccagatcggcgtgtcg

SEQ ID NO: 2538 - DNA, 60 bp, Artificial Sequence
  Description of Artificial Sequence: targeting sequence/synthetic sequence
acgcagggccgcctctgcaacaagacctcggagggcatggatggctgtgagctcatgtgc

SEQ ID NO: 2539 - DNA, 60 bp, Artificial Sequence
  Description of Artificial Sequence: targeting sequence/synthetic sequence
gtggaccggggctggggcaacggctgcggcctgttcggcaagggcggaatcgtgacctgc

SEQ ID NO: 2540 - DNA, 60 bp, Artificial Sequence
  Description of Artificial Sequence: targeting sequence/synthetic sequence
gaggcaaagacctctgaggccccgtccacccaggacccctccacccaggcctccactgcg

SEQ ID NO: 2541 - DNA, 60 bp, Artificial Sequence
  Description of Artificial Sequence: targeting sequence/synthetic sequence
ctttcagatggagtggctgtgctgaaggttggtgggacaagtgatgttgaagtgaatgaa

SEQ ID NO: 2542 - DNA, 60 bp, Artificial Sequence
  Description of Artificial Sequence: targeting sequence/synthetic sequence
gcacagacaactcgactgacggccacggaggcacagaccactccactggcagccacagag

SEQ ID NO: 2543 - DNA, 60 bp, Artificial Sequence
  Description of Artificial Sequence: targeting sequence/synthetic sequence
ccgtctaccaaaaaaagggaaagggatgaagaaaatcaagaaatgtcttcatgcaaatca

SEQ ID NO: 2544 - DNA, 60 bp, Artificial Sequence
  Description of Artificial Sequence: targeting sequence/synthetic sequence
tggagcaccagcaccgagaccggcgtgaagatgagctccgagttcgaggtggagggcgcc

SEQ ID NO: 2545 - DNA, 60 bp, Artificial Sequence
  Description of Artificial Sequence: targeting sequence/synthetic sequence
ggggtgagcacctcagcccctctttccccaacctcgggcacaagcgtgggcatgtctacc

SEQ ID NO: 2546 - DNA, 60 bp, Artificial Sequence
  Description of Artificial Sequence: targeting sequence/synthetic sequence
gaggagagctgtgcggaggcgcaggacggggagctggacgggctgtggacgaccatcacc

SEQ ID NO: 2547 - DNA, 60 bp, Artificial Sequence
  Description of Artificial Sequence: targeting sequence/synthetic sequence
ctggcggctggcgccctgacgcagccggtgcctcccgcagatcccgcgggctccgggctg

SEQ ID NO: 2548 - DNA, 60 bp, Artificial Sequence
  Description of Artificial Sequence: targeting sequence/synthetic sequence
gccgtttgcgagcccaacgcggaaggacctggccgagcctcgtgtgtctgtaaaaagagt

SEQ ID NO: 2549 - DNA, 60 bp, Artificial Sequence
  Description of Artificial Sequence: targeting sequence/synthetic sequence
acagtttttcgggaaccgactgctatttcagcaatggagctttccactaagcagcaacaa

SEQ ID NO: 2550 - DNA, 60 bp, Artificial Sequence
  Description of Artificial Sequence: targeting sequence/synthetic sequence
caagagacatataagaaggtgatgaactggaaagaaactttgacttttcctccagaagtt

SEQ ID NO: 2551 - DNA, 60 bp, Artificial Sequence
  Description of Artificial Sequence: targeting sequence/synthetic sequence
ggattgaaaggagagcgtggcccccctggaggagttggattcccaggcagtcgtggtgac

SEQ ID NO: 2552 - DNA, 60 bp, Artificial Sequence
  Description of Artificial Sequence: targeting sequence/synthetic sequence
gagaagattaagaagaaggatccaaagtgtatatttgcatgtgaagagatgtcaggagaa

SEQ ID NO: 2553 - DNA, 60 bp, Artificial Sequence
  Description of Artificial Sequence: targeting sequence/synthetic sequence
acgcccactctccggaatggcctggaagagaacttctgccgtaaccctgatggcgacccc

SEQ ID NO: 2554 - DNA, 60 bp, Artificial Sequence
  Description of Artificial Sequence: targeting sequence/synthetic sequence
gaaaaaaacaacagccgtatcaagcttggcctcaagagcttggtgagcaaaggtaccctg

SEQ ID NO: 2555 - DNA, 60 bp, Artificial Sequence
  Description of Artificial Sequence: targeting sequence/synthetic sequence
ctcgttggaggctgtgcagcagaagagccccccaggtttatcaaagaacccaaggaccag

SEQ ID NO: 2556 - DNA, 60 bp, Artificial Sequence
  Description of Artificial Sequence: targeting sequence/synthetic sequence
ttcaatggctccggcaagcccattgacaaggggccagtggtcatggcggaggactttctg

SEQ ID NO: 2557 - DNA, 60 bp, Artificial Sequence
  Description of Artificial Sequence: targeting sequence/synthetic sequence
atcctggagatcgccagcaacatccagccccagaacgtggacagcgtgtgcagcggcacc

SEQ ID NO: 2558 - DNA, 60 bp, Artificial Sequence
  Description of Artificial Sequence: targeting sequence/synthetic sequence
ttcgggcaaggatcaggccccatcatgctggatgaggtccagtgcacgggaaccgaggcc

SEQ ID NO: 2559 - DNA, 60 bp, Artificial Sequence
  Description of Artificial Sequence: targeting sequence/synthetic sequence
tgctacaacatcagcgtgaccgaccccagcggcaagagcctgctcctggacccccctacc

SEQ ID NO: 2560 - DNA, 60 bp, Artificial Sequence
  Description of Artificial Sequence: targeting sequence/synthetic sequence
gtgtacgccgacgccgctcccgacctgttcgacttcctggacagctccgtgaccacagcc

SEQ ID NO: 2561 - DNA, 60 bp, Artificial Sequence
  Description of Artificial Sequence: targeting sequence/synthetic sequence
gagggctgccggcagatcctgggccagctgcagcccagcctgaagaccggcagcgaggaa

SEQ ID NO: 2562 - DNA, 60 bp, Artificial Sequence
  Description of Artificial Sequence: targeting sequence/synthetic sequence
gaaaagggtgaagcaggtcctcctggcccacctggaattgttataggcacaggacctttg

SEQ ID NO: 2563 - DNA, 60 bp, Artificial Sequence
  Description of Artificial Sequence: targeting sequence/synthetic sequence
gaagcagagatctcccacacccaaaaggccacactggtgtgcctggccacaggcttctac

SEQ ID NO: 2564 - DNA, 60 bp, Artificial Sequence
  Description of Artificial Sequence: targeting sequence/synthetic sequence
ctttctcaaggactcgtatgccctatgtctgtagatcaaaaggacactacgccttattct

SEQ ID NO: 2565 - DNA, 60 bp, Artificial Sequence
  Description of Artificial Sequence: targeting sequence/synthetic sequence
gagatgaagaaccccgaggccagcaagctgaacaagcgggacggctgcagctccggcgga

SEQ ID NO: 2566 - DNA, 60 bp, Artificial Sequence
  Description of Artificial Sequence: targeting sequence/synthetic sequence
agcagggggctctccgacccgtgggcagactcagtgggagtgcgaccccgcaccacggag

SEQ ID NO: 2567 - DNA, 60 bp, Artificial Sequence
  Description of Artificial Sequence: targeting sequence/synthetic sequence
aagtgtgagatcgccctggagaaactcaagaatgacatggcggtgcccactcccccaccg

SEQ ID NO: 2568 - DNA, 60 bp, Artificial Sequence
  Description of Artificial Sequence: targeting sequence/synthetic sequence
gatatagacggatatcgggggcctcccgggccacagggacccccgggagaaataggtttc

SEQ ID NO: 2569 - DNA, 60 bp, Artificial Sequence
  Description of Artificial Sequence: targeting sequence/synthetic sequence
tgcaaggagttccaccccgacaagggcggagacgaggaaaagatgaagaaaatgaacacc

SEQ ID NO: 2570 - DNA, 60 bp, Artificial Sequence
  Description of Artificial Sequence: targeting sequence/synthetic sequence
gcacagaccactccaccagcagccatggaggcacagaccactcaaaccacagccatggag

SEQ ID NO: 2571 - DNA, 60 bp, Artificial Sequence
  Description of Artificial Sequence: targeting sequence/synthetic sequence
ttgcctttcgatgaagattatataatagaaattaagccattcagcgacggaggagatggc

SEQ ID NO: 2572 - DNA, 60 bp, Artificial Sequence
  Description of Artificial Sequence: targeting sequence/synthetic sequence
ggacaaccagggtcccctggttctcctggcccccctggaatctgtgaatcatgccctact

SEQ ID NO: 2573 - DNA, 60 bp, Artificial Sequence
  Description of Artificial Sequence: targeting sequence/synthetic sequence
cctggaaagaatggtgaaactggacctcagggacccccagggcctactgggcctggtggt

SEQ ID NO: 2574 - DNA, 60 bp, Artificial Sequence
  Description of Artificial Sequence: targeting sequence/synthetic sequence
gtctcccctatctgggaacctcctccagccacaacatcaacaactccagttctatcctcc

SEQ ID NO: 2575 - DNA, 60 bp, Artificial Sequence
  Description of Artificial Sequence: targeting sequence/synthetic sequence
gtggatgaatgctctttgaagccaagcatttgtggcacagctgtgtgcaagaacatccca

SEQ ID NO: 2576 - DNA, 60 bp, Artificial Sequence
  Description of Artificial Sequence: targeting sequence/synthetic sequence
tggccagatacagctgtcgcccctgggccaccacctggcccccctcgagtttccccagac

SEQ ID NO: 2577 - DNA, 60 bp, Artificial Sequence
  Description of Artificial Sequence: targeting sequence/synthetic sequence
gtggaatgtcagcccggacctccaggtgaccagggtcctcctggaattccagggcagcca

SEQ ID NO: 2578 - DNA, 60 bp, Artificial Sequence
  Description of Artificial Sequence: targeting sequence/synthetic sequence
ccattgtttgatgagacctttgaattcctggtgcctgctgagccgtgccgcaaggctggg

SEQ ID NO: 2579 - DNA, 60 bp, Artificial Sequence
  Description of Artificial Sequence: targeting sequence/synthetic sequence
cctcctaaaccactgaaaaaactacgctttgatattgaaggatcagatgaagcagatgga

SEQ ID NO: 2580 - DNA, 60 bp, Artificial Sequence
  Description of Artificial Sequence: targeting sequence/synthetic sequence
acgccaggcgccgacggtggcccctcaggctttccggagcgcggcggcaacgggagcctc

SEQ ID NO: 2581 - DNA, 60 bp, Artificial Sequence
  Description of Artificial Sequence: targeting sequence/synthetic sequence
gagaaagaggaacaagaagagagagagacaaagacaccagagtgtccgagccacacccag

SEQ ID NO: 2582 - DNA, 60 bp, Artificial Sequence
  Description of Artificial Sequence: targeting sequence/synthetic sequence
ggggaaaaagggagtcccggttttcctggtgaacccgggtacccaggactcataggccgc

SEQ ID NO: 2583 - DNA, 60 bp, Artificial Sequence
  Description of Artificial Sequence: targeting sequence/synthetic sequence
atgaagggtgatccaggtgagatacttggccatgtgcccgggatgctgttgaaaggtgaa

SEQ ID NO: 2584 - DNA, 60 bp, Artificial Sequence
  Description of Artificial Sequence: targeting sequence/synthetic sequence
ctcaaaaccgacgacacggccgtgtattattgtgttagagatcttgagggggctggtaaa

SEQ ID NO: 2585 - DNA, 60 bp, Artificial Sequence
  Description of Artificial Sequence: targeting sequence/synthetic sequence
ttctttgagggccggtgcgagcggatgggcgaggccgacgagaccatgtggggcaccaag

SEQ ID NO: 2586 - DNA, 60 bp, Artificial Sequence
  Description of Artificial Sequence: targeting sequence/synthetic sequence
ctctccctgtctccggagctgcaactggaggagagctgtgcggaggcgcaggacggggag

SEQ ID NO: 2587 - DNA, 60 bp, Artificial Sequence
  Description of Artificial Sequence: targeting sequence/synthetic sequence
gagcctggtgaggtgcctcagacccgcctgcccctcacgtaccccgcacccaacggggac

SEQ ID NO: 2588 - DNA, 60 bp, Artificial Sequence
  Description of Artificial Sequence: targeting sequence/synthetic sequence
gcccttgtacgagacccgcgggtcctcatcctggatgaggctactagtgccctagatgtg

SEQ ID NO: 2589 - DNA, 60 bp, Artificial Sequence
  Description of Artificial Sequence: targeting sequence/synthetic sequence
ccatcaatcctggaccccccagaccaggtgcagtttgagaagtgtggcaagagggtggat

SEQ ID NO: 2590 - DNA, 60 bp, Artificial Sequence
  Description of Artificial Sequence: targeting sequence/synthetic sequence
cagaccactcaaccagcagccacggaggcacagaccactccactggcagccacagaggca

SEQ ID NO: 2591 - DNA, 60 bp, Artificial Sequence
  Description of Artificial Sequence: targeting sequence/synthetic sequence
gaggccgagaagcagtacgaagactcctgccgcgtataccaggcatccagccccgatgag

SEQ ID NO: 2592 - DNA, 60 bp, Artificial Sequence
  Description of Artificial Sequence: targeting sequence/synthetic sequence
accatccaacccacccaaccaactacccagctcccaacagattctcctacccagcccact

SEQ ID NO: 2593 - DNA, 60 bp, Artificial Sequence
  Description of Artificial Sequence: targeting sequence/synthetic sequence
cagatcttgagcaagctcaggctcaccagcccccctgagccaacggtgatgacccacgtc

SEQ ID NO: 2594 - DNA, 60 bp, Artificial Sequence
  Description of Artificial Sequence: targeting sequence/synthetic sequence
ctgggcagagctgccttcgggcaaggatcaggccccatcatgctggatgaggtccagtgc

SEQ ID NO: 2595 - DNA, 60 bp, Artificial Sequence
  Description of Artificial Sequence: targeting sequence/synthetic sequence
aaaggcgatgctggtccccctggccctgccggacccgctggaccccctggccccattggt

SEQ ID NO: 2596 - DNA, 60 bp, Artificial Sequence
  Description of Artificial Sequence: targeting sequence/synthetic sequence
actgaacgctgctcagatggctggagctttgatgctaccaccctggatgacaatggaacc

SEQ ID NO: 2597 - DNA, 60 bp, Artificial Sequence
  Description of Artificial Sequence: targeting sequence/synthetic sequence
gagatcgtgtgcggcgaggacgatccctgcggcacccagatctgcgagtgcgacaaggcc

SEQ ID NO: 2598 - DNA, 60 bp, Artificial Sequence
  Description of Artificial Sequence: targeting sequence/synthetic sequence
gagatgttgggcagtggccagagccggagcccctgggctgatctgaccaatgaggtggat

SEQ ID NO: 2599 - DNA, 60 bp, Artificial Sequence
  Description of Artificial Sequence: targeting sequence/synthetic sequence
aatttcagctggtacctagaagacaacattaaaacctactgctcagaaccagagaaagtt

SEQ ID NO: 2600 - DNA, 60 bp, Artificial Sequence
  Description of Artificial Sequence: targeting sequence/synthetic sequence
gtagactttggtagtgcaacatatgatgacgaacatcacagtacattggtatctacaaga

SEQ ID NO: 2601 - DNA, 60 bp, Artificial Sequence
  Description of Artificial Sequence: targeting sequence/synthetic sequence
aaactgggctcggagataatagactcctcaaccaggagaatggagagcgaaagatcaccg

SEQ ID NO: 2602 - DNA, 60 bp, Artificial Sequence
  Description of Artificial Sequence: targeting sequence/synthetic sequence
gacatgggcttcgtgcccagtgctgacgggaaagcctgtgaagatattgatgagtgctcc

SEQ ID NO: 2603 - DNA, 60 bp, Artificial Sequence
  Description of Artificial Sequence: targeting sequence/synthetic sequence
gcagaagatgacacttgggagcctgagcagaaactttgcaaattgaggaaaggaaactgc

SEQ ID NO: 2604 - DNA, 60 bp, Artificial Sequence
  Description of Artificial Sequence: targeting sequence/synthetic sequence
actgcaccagaagccacggaggcacagaccactcaacccacagccacggaggcacagacc

SEQ ID NO: 2605 - DNA, 60 bp, Artificial Sequence
  Description of Artificial Sequence: targeting sequence/synthetic sequence
tctggctaccctggaaacccaggacttcccggaattcctggccaagacggcccgccaggc

SEQ ID NO: 2606 - DNA, 60 bp, Artificial Sequence
  Description of Artificial Sequence: targeting sequence/synthetic sequence
acgctggcggcccggcccgcgcctagccccggcctcggccccggacccgagtgtttcaca

SEQ ID NO: 2607 - DNA, 60 bp, Artificial Sequence
  Description of Artificial Sequence: targeting sequence/synthetic sequence
gaatgtgcactagatcctgatatttgcccaaatggaatctgtgaaaaccttcgtgggacc

SEQ ID NO: 2608 - DNA, 60 bp, Artificial Sequence
  Description of Artificial Sequence: targeting sequence/synthetic sequence
accagctggagcaccagcaccgagaccggcgtgaagatgagctccgagttcgaggtggag

SEQ ID NO: 2609 - DNA, 60 bp, Artificial Sequence
  Description of Artificial Sequence: targeting sequence/synthetic sequence
tgctgtaaacaaagctccgtcctaaactggcaggactgtgaggtgccaagtcctcagtct

SEQ ID NO: 2610 - DNA, 60 bp, Artificial Sequence
  Description of Artificial Sequence: targeting sequence/synthetic sequence
ggtctaccgggactcaaaggtttgccaggtcttcccggcattcctggcacacccggggag

SEQ ID NO: 2611 - DNA, 60 bp, Artificial Sequence
  Description of Artificial Sequence: targeting sequence/synthetic sequence
gccccgggaccaatcaccatggaccttactggagatctggaagccctcaaaaaggaaacc

SEQ ID NO: 2612 - DNA, 60 bp, Artificial Sequence
  Description of Artificial Sequence: targeting sequence/synthetic sequence
ggttttgactctacaaaggaccttcctgatgatgttataacctttgcaagaagtcatcca

SEQ ID NO: 2613 - DNA, 60 bp, Artificial Sequence
  Description of Artificial Sequence: targeting sequence/synthetic sequence
aaggccggggtgctcagccaggccgactacctcaacctggtgcagtgcgagacgctagag

SEQ ID NO: 2614 - DNA, 60 bp, Artificial Sequence
  Description of Artificial Sequence: targeting sequence/synthetic sequence
ccccctgggcctatggtttcagaaccagctggcgctgctgcagaaggaaccttgcggccc

SEQ ID NO: 2615 - DNA, 60 bp, Artificial Sequence
  Description of Artificial Sequence: targeting sequence/synthetic sequence
ggctgccggcagatcctgggccagctgcagcccagcctgaagaccggcagcgaggaactg

SEQ ID NO: 2616 - DNA, 60 bp, Artificial Sequence
  Description of Artificial Sequence: targeting sequence/synthetic sequence
agaaggaatgtaccacatgaagatatctgtgaagactctgatatagatggtgattataga

SEQ ID NO: 2617 - DNA, 60 bp, Artificial Sequence
  Description of Artificial Sequence: targeting sequence/synthetic sequence
gactacgggcacccggtgtacatcgtccaggagatgcccccgcagagcccggcgaacatt

SEQ ID NO: 2618 - DNA, 60 bp, Artificial Sequence
  Description of Artificial Sequence: targeting sequence/synthetic sequence
gaaatggaaactctgggtaaagatataactcctatcaatgaagatattgaagagacaaat

SEQ ID NO: 2619 - DNA, 60 bp, Artificial Sequence
  Description of Artificial Sequence: targeting sequence/synthetic sequence
tcccggacccctgaggtcacatgcgtggtggtggacgtgagccacgaagaccctgaggtc

SEQ ID NO: 2620 - DNA, 60 bp, Artificial Sequence
  Description of Artificial Sequence: targeting sequence/synthetic sequence
gccttcgggcaaggatcaggccccatcatgctggatgaggtccagtgcacgggaaccgag

SEQ ID NO: 2621 - DNA, 60 bp, Artificial Sequence
  Description of Artificial Sequence: targeting sequence/synthetic sequence
tctgacgaagaggaagaccctcctgccaaaaggaaatgcatctttatgtcagaaacacaa

SEQ ID NO: 2622 - DNA, 60 bp, Artificial Sequence
  Description of Artificial Sequence: targeting sequence/synthetic sequence
gtgctgaaggtgctatctgtctgctctagtaataagccggctattgtagaagctggtgga

SEQ ID NO: 2623 - DNA, 60 bp, Artificial Sequence
  Description of Artificial Sequence: targeting sequence/synthetic sequence
acccccgtggacgagctggaccggtgctgtaagatccacgacgattgctacgacgaggcc

SEQ ID NO: 2624 - DNA, 60 bp, Artificial Sequence
  Description of Artificial Sequence: targeting sequence/synthetic sequence
tgcaaccgcaaacggaaaggcagctccactgactaccaagaaagcatggacacagacaaa

SEQ ID NO: 2625 - DNA, 60 bp, Artificial Sequence
  Description of Artificial Sequence: targeting sequence/synthetic sequence
cagtttactaatgaacgtgtccagctcactccagatgacgatgacattgtgaggaagatt

SEQ ID NO: 2626 - DNA, 60 bp, Artificial Sequence
  Description of Artificial Sequence: targeting sequence/synthetic sequence
ccacctggtggtgatttttctgatccagttacatctgccactcttggtatcgttcaggtg

SEQ ID NO: 2627 - DNA, 60 bp, Artificial Sequence
  Description of Artificial Sequence: targeting sequence/synthetic sequence
ctgatggcggtactggcggctggcgccctgacgcagccggtgcctcccgcagatcccgcg

SEQ ID NO: 2628 - DNA, 60 bp, Artificial Sequence
  Description of Artificial Sequence: targeting sequence/synthetic sequence
gacgtctggggccaagggaccacggtcaccgtctcctcagcacccaccaaggctccggat

SEQ ID NO: 2629 - DNA, 60 bp, Artificial Sequence
  Description of Artificial Sequence: targeting sequence/synthetic sequence
cgcctctcaggagagctggtctactttgagaagtctcctgacttctgtgagcgagacccc

SEQ ID NO: 2630 - DNA, 60 bp, Artificial Sequence
  Description of Artificial Sequence: targeting sequence/synthetic sequence
cccgtggacgatctggaccggtgctgtcaggtgcacgacgagtgctacggcgaggccgtg

SEQ ID NO: 2631 - DNA, 60 bp, Artificial Sequence
  Description of Artificial Sequence: targeting sequence/synthetic sequence
agcaaccctcctaaaccactgaaaaaactacgctttgatattgaaggatcagatgaagca

SEQ ID NO: 2632 - DNA, 60 bp, Artificial Sequence
  Description of Artificial Sequence: targeting sequence/synthetic sequence
cctcagcctcctcggaagaaaagggcccgggtagatcctactgttgaaaatgaggaaaca

SEQ ID NO: 2633 - DNA, 60 bp, Artificial Sequence
  Description of Artificial Sequence: targeting sequence/synthetic sequence
gaggctggtattccaggtgttccaggagctaaaggcgaagatggcaaggatggatcacct

SEQ ID NO: 2634 - DNA, 60 bp, Artificial Sequence
  Description of Artificial Sequence: targeting sequence/synthetic sequence
ctgaagaaatgcaaggagttccaccccgacaagggcggagacgaggaaaagatgaagaaa

SEQ ID NO: 2635 - DNA, 60 bp, Artificial Sequence
  Description of Artificial Sequence: targeting sequence/synthetic sequence
accttcccaggaccaggagaagatgggctgaatccgtttttagaggtcaaggtaacagac

SEQ ID NO: 2636 - DNA, 60 bp, Artificial Sequence
  Description of Artificial Sequence: targeting sequence/synthetic sequence
gggggagagctgtttgacaaagtggtggggaataaacgcctgaaagaagctacctgcaag

SEQ ID NO: 2637 - DNA, 60 bp, Artificial Sequence
  Description of Artificial Sequence: targeting sequence/synthetic sequence
gtggatgaaaatttcagctggtacctagaagacaacattaaaacctactgctcagaacca

SEQ ID NO: 2638 - DNA, 60 bp, Artificial Sequence
  Description of Artificial Sequence: targeting sequence/synthetic sequence
attccaggaacaactgttatgggaccacctggtcctccaggtcctcctggtcctcaagga

SEQ ID NO: 2639 - DNA, 60 bp, Artificial Sequence
  Description of Artificial Sequence: targeting sequence/synthetic sequence
gccatgacgccgcccaatgccaccgaagcctccaagccccaaggcacaacggtgtgtcct

SEQ ID NO: 2640 - DNA, 60 bp, Artificial Sequence
  Description of Artificial Sequence: targeting sequence/synthetic sequence
actggacctcagggacccccagggcctactgggcctggtggtgacaaaggagacacagga

SEQ ID NO: 2641 - DNA, 60 bp, Artificial Sequence
  Description of Artificial Sequence: targeting sequence/synthetic sequence
gagaaaggtgaaggaggccctcctggagttgcaggacctcctggcaaagatggaaccagt

SEQ ID NO: 2642 - DNA, 60 bp, Artificial Sequence
  Description of Artificial Sequence: targeting sequence/synthetic sequence
gaaggattcctggagagtaaagtgtttatttcaaatagtaccaattcatcaaacccttgt

SEQ ID NO: 2643 - DNA, 60 bp, Artificial Sequence
  Description of Artificial Sequence: targeting sequence/synthetic sequence
gaaacatcacagctttctcaaggactcgtatgccctatgtctgtagatcaaaaggacact

SEQ ID NO: 2644 - DNA, 60 bp, Artificial Sequence
  Description of Artificial Sequence: targeting sequence/synthetic sequence
cacatgatgagcgccgtggaccgcagcttcacagaccagagcaccctgcaggaggacgag

SEQ ID NO: 2645 - DNA, 60 bp, Artificial Sequence
  Description of Artificial Sequence: targeting sequence/synthetic sequence
ggggtgctcagccaggccgactacctcaacctggtgcagtgcgagacgctagaggacttg

SEQ ID NO: 2646 - DNA, 60 bp, Artificial Sequence
  Description of Artificial Sequence: targeting sequence/synthetic sequence
actgatgaacccaccacacaacccaccacagagcccaccacccaacccaccatccaaccc

SEQ ID NO: 2647 - DNA, 60 bp, Artificial Sequence
  Description of Artificial Sequence: targeting sequence/synthetic sequence
agccccgtgctcacctttgctggcggcctgccagatgtgccggtgacttcagcgccagtc

SEQ ID NO: 2648 - DNA, 60 bp, Artificial Sequence
  Description of Artificial Sequence: targeting sequence/synthetic sequence
ggcgctgtgggccagccaggcattggatttccagggccccccggccccaaaggtgttgac

SEQ ID NO: 2649 - DNA, 60 bp, Artificial Sequence
  Description of Artificial Sequence: targeting sequence/synthetic sequence
tctgcctcagtttcctcaggggagcctacggtaccgtgggacccctccagcaccctgctg

SEQ ID NO: 2650 - DNA, 60 bp, Artificial Sequence
  Description of Artificial Sequence: targeting sequence/synthetic sequence
gccaaggccgaccagtgctatgaagatgtgcgcgtctcacagaccacctgggacagtggc

SEQ ID NO: 2651 - DNA, 60 bp, Artificial Sequence
  Description of Artificial Sequence: targeting sequence/synthetic sequence
gaaaaaggagagaggggctaccctggaactccggggccaagaggagagccaggcccaaaa

SEQ ID NO: 2652 - DNA, 60 bp, Artificial Sequence
  Description of Artificial Sequence: targeting sequence/synthetic sequence
aagggaaagaaagcaggacctcctggacccaatggccctccaggacccccaggacctcca

SEQ ID NO: 2653 - DNA, 60 bp, Artificial Sequence
  Description of Artificial Sequence: targeting sequence/synthetic sequence
tccatgttcttaccccgagatgacctcagcccagccagggacctactggatgtgccctca

SEQ ID NO: 2654 - DNA, 60 bp, Artificial Sequence
  Description of Artificial Sequence: targeting sequence/synthetic sequence
gcagctatggagatacagaccactcaaccagcagccacggaggcacagaccactccactg

SEQ ID NO: 2655 - DNA, 60 bp, Artificial Sequence
  Description of Artificial Sequence: targeting sequence/synthetic sequence
gccaaggccgctcggaagaaagccgctaaggccgctcggaagaaagccgctaaggccgct

SEQ ID NO: 2656 - DNA, 60 bp, Artificial Sequence
  Description of Artificial Sequence: targeting sequence/synthetic sequence
ctcacctttgctggcggcctgccagatgtgccggtgacttcagcgccagtcaccgcgttc

SEQ ID NO: 2657 - DNA, 60 bp, Artificial Sequence
  Description of Artificial Sequence: targeting sequence/synthetic sequence
aactgccacctggccagagccccgaatcacgctgtggtcacacggaaagataaggaagct

SEQ ID NO: 2658 - DNA, 60 bp, Artificial Sequence
  Description of Artificial Sequence: targeting sequence/synthetic sequence
aatttccggccaggggtgcttagcagtggctgcgagttgccagagtctctgcaggcccca

SEQ ID NO: 2659 - DNA, 60 bp, Artificial Sequence
  Description of Artificial Sequence: targeting sequence/synthetic sequence
ctgcgcaagtgcctggagagcggcatgaagaaggagatgatcatgtccgacgaggccgtg

SEQ ID NO: 2660 - DNA, 60 bp, Artificial Sequence
  Description of Artificial Sequence: targeting sequence/synthetic sequence
ctgcaccggctccaggaggccccaaaaaaggagtcccctggctgcctcgaggcctctgtc

SEQ ID NO: 2661 - DNA, 60 bp, Artificial Sequence
  Description of Artificial Sequence: targeting sequence/synthetic sequence
ctagggtgttgcagtgacggcaagaccccaagtttggacgccgagggatcgaattgccca

SEQ ID NO: 2662 - DNA, 60 bp, Artificial Sequence
  Description of Artificial Sequence: targeting sequence/synthetic sequence
gctctgggagcccagaaggaagccatctcccctccagatgcggcctcagctgctccactc

SEQ ID NO: 2663 - DNA, 60 bp, Artificial Sequence
  Description of Artificial Sequence: targeting sequence/synthetic sequence
gcttcagagaccaactgggaatctgtcacaagctctatttcaggggtatcctataactct

SEQ ID NO: 2664 - DNA, 60 bp, Artificial Sequence
  Description of Artificial Sequence: targeting sequence/synthetic sequence
gcgccattcaggtctgccctggagagcagcccagacccggccacactcagtaaagaggac

SEQ ID NO: 2665 - DNA, 60 bp, Artificial Sequence
  Description of Artificial Sequence: targeting sequence/synthetic sequence
gtgggacctgatgattcagcagttgatatggacgaatgcaaagaacccgatgtctgtaaa

SEQ ID NO: 2666 - DNA, 60 bp, Artificial Sequence
  Description of Artificial Sequence: targeting sequence/synthetic sequence
ttctgcttctcagactctattccgacaccctccaacatggaggaaacgcaacagaaatcc

SEQ ID NO: 2667 - DNA, 60 bp, Artificial Sequence
  Description of Artificial Sequence: targeting sequence/synthetic sequence
ccagcgcacacggatgccttccaggactgggggcctggcagcatggcccacgtctctgtg

SEQ ID NO: 2668 - DNA, 60 bp, Artificial Sequence
  Description of Artificial Sequence: targeting sequence/synthetic sequence
actccaggcccaccaggactgccagggcttcaaggtcctgttgggcctccaggatttacc

SEQ ID NO: 2669 - DNA, 60 bp, Artificial Sequence
  Description of Artificial Sequence: targeting sequence/synthetic sequence
ctggtttacacccaggtagcagagcagcttatcaacccttttggagaagatgatgatgat

SEQ ID NO: 2670 - DNA, 60 bp, Artificial Sequence
  Description of Artificial Sequence: targeting sequence/synthetic sequence
tcaaccctgccacccccatggagtccccggcccctggaggccacagccccgacagccccg

SEQ ID NO: 2671 - DNA, 60 bp, Artificial Sequence
  Description of Artificial Sequence: targeting sequence/synthetic sequence
aagttcatcgagtggctgaaggcccggatcctgcccgaggtgaaggagaagcacgagttc

SEQ ID NO: 2672 - DNA, 60 bp, Artificial Sequence
  Description of Artificial Sequence: targeting sequence/synthetic sequence
tgttgtgtcgagtgcccaccgtgcccagcaccacctgtggcaggaccgtcagtcttcctc

SEQ ID NO: 2673 - DNA, 60 bp, Artificial Sequence
  Description of Artificial Sequence: targeting sequence/synthetic sequence
ctagatcctgatatttgcccaaatggaatctgtgaaaaccttcgtgggacctataaatgt

SEQ ID NO: 2674 - DNA, 60 bp, Artificial Sequence
  Description of Artificial Sequence: targeting sequence/synthetic sequence
ctgcaccggctccaggaggcccccaaaaaggagtccgctggctgcctggaggcatctgtc

SEQ ID NO: 2675 - DNA, 60 bp, Artificial Sequence
  Description of Artificial Sequence: targeting sequence/synthetic sequence
ggggagcccgctgaggtcacgaccacggtgctggtgaggagagatcaccatggagccaat

SEQ ID NO: 2676 - DNA, 60 bp, Artificial Sequence
  Description of Artificial Sequence: targeting sequence/synthetic sequence
acagagatgttgggcagtggccagagccggagcccctgggctgatctgaccaatgaggtg

SEQ ID NO: 2677 - DNA, 60 bp, Artificial Sequence
  Description of Artificial Sequence: targeting sequence/synthetic sequence
aacggcaaggagtacaagtgcaaggtgagcaacaaggccctgcccgcccccatcgagaag

SEQ ID NO: 2678 - DNA, 60 bp, Artificial Sequence
  Description of Artificial Sequence: targeting sequence/synthetic sequence
caagagacagctgtaacccagacttacggtggcaactcaaatggagagccatgtgtctta

SEQ ID NO: 2679 - DNA, 60 bp, Artificial Sequence
  Description of Artificial Sequence: targeting sequence/synthetic sequence
gacccgtgggcagactcagtgggagtgcgaccccgcaccacggagcgccacatcgccgta

SEQ ID NO: 2680 - DNA, 60 bp, Artificial Sequence
  Description of Artificial Sequence: targeting sequence/synthetic sequence
ccaccacctgatctggcaacttctcccaccaaaagccctttcaagataccaccggtaact

SEQ ID NO: 2681 - DNA, 60 bp, Artificial Sequence
  Description of Artificial Sequence: targeting sequence/synthetic sequence
gttctgggccggttggtccactgccccatagagacccaagttctgcgggaggctgaggag

SEQ ID NO: 2682 - DNA, 60 bp, Artificial Sequence
  Description of Artificial Sequence: targeting sequence/synthetic sequence
acagctacctgcattgccaaaagttcacatctcgtgtctagaacacaagatattcatatt

SEQ ID NO: 2683 - DNA, 60 bp, Artificial Sequence
  Description of Artificial Sequence: targeting sequence/synthetic sequence
ggtcctgttgggcctccaggatttaccggaccaccaggtcccccaggccctcccggccct

SEQ ID NO: 2684 - DNA, 60 bp, Artificial Sequence
  Description of Artificial Sequence: targeting sequence/synthetic sequence
ctacataacaatgaagctggaaggcaggctgtcgccaagttgatgtcagtagactgccgc

SEQ ID NO: 2685 - DNA, 60 bp, Artificial Sequence
  Description of Artificial Sequence: targeting sequence/synthetic sequence
ccactgccccagccgctgcctgggactgaacccacttggactcctggccctgcccacagt

SEQ ID NO: 2686 - DNA, 60 bp, Artificial Sequence
  Description of Artificial Sequence: targeting sequence/synthetic sequence
acatctctgccaggaccaagtggaagagatgggctcccgggtcctcctggttcccctggg

SEQ ID NO: 2687 - DNA, 60 bp, Artificial Sequence
  Description of Artificial Sequence: targeting sequence/synthetic sequence
gccgtggaggtgagccccggctgctggatcattgacaacaatatctgcgaccagagctgc

SEQ ID NO: 2688 - DNA, 60 bp, Artificial Sequence
  Description of Artificial Sequence: targeting sequence/synthetic sequence
gctcagggaccccctggccctgctggtcccgctggcgagagaggtgaacaaggccctgct

SEQ ID NO: 2689 - DNA, 60 bp, Artificial Sequence
  Description of Artificial Sequence: targeting sequence/synthetic sequence
aatggccctccaggacccccaggacctccaggaccccagggacccccaggaattccaggg

SEQ ID NO: 2690 - DNA, 60 bp, Artificial Sequence
  Description of Artificial Sequence: targeting sequence/synthetic sequence
gtggacagcaacctctgtggggccatggacccctccgacggcattggagccctcatcgag

SEQ ID NO: 2691 - DNA, 60 bp, Artificial Sequence
  Description of Artificial Sequence: targeting sequence/synthetic sequence
gcacagaccactgcaccagaagccacggaggcacagaccactcaacccacagccacggag

SEQ ID NO: 2692 - DNA, 60 bp, Artificial Sequence
  Description of Artificial Sequence: targeting sequence/synthetic sequence
gcgcaaggggatgttccagtcactgttactgtccacgacttcccaggcaaaaaactagtg

SEQ ID NO: 2693 - DNA, 60 bp, Artificial Sequence
  Description of Artificial Sequence: targeting sequence/synthetic sequence
cccagctgctgccccagcaaagggcaggacacctctgaggagctgctgaggtggagcact

SEQ ID NO: 2694 - DNA, 60 bp, Artificial Sequence
  Description of Artificial Sequence: targeting sequence/synthetic sequence
tctgttgctaatgacaccggctttgtggacatccctaagcaggagaaggccctgatgaag

SEQ ID NO: 2695 - DNA, 60 bp, Artificial Sequence
  Description of Artificial Sequence: targeting sequence/synthetic sequence
tggacccagctgacctacatccacaaggagagcgacagctggctgaagaaattcaccgag

SEQ ID NO: 2696 - DNA, 60 bp, Artificial Sequence
  Description of Artificial Sequence: targeting sequence/synthetic sequence
gtggacacgcaggggaccgtggtctgttccctggacgggctgttcccagtctcggaggcc

SEQ ID NO: 2697 - DNA, 60 bp, Artificial Sequence
  Description of Artificial Sequence: targeting sequence/synthetic sequence
cagccgctgcctgggactgaacccacttggactcctggccctgcccacagtgacttcctc

SEQ ID NO: 2698 - DNA, 60 bp, Artificial Sequence
  Description of Artificial Sequence: targeting sequence/synthetic sequence
gtgctcagctgcaagtcaagctgctctctgggctgtgatctccctgagacccacagcttg

SEQ ID NO: 2699 - DNA, 60 bp, Artificial Sequence
  Description of Artificial Sequence: targeting sequence/synthetic sequence
ttggtccactgccccatagagacccaagttctgcgggaggctgaggagcaccaggagacc

SEQ ID NO: 2700 - DNA, 60 bp, Artificial Sequence
  Description of Artificial Sequence: targeting sequence/synthetic sequence
ggctctgagcccgaggaagaggaggatgtctcccaagccatccttttcccagccacagat

SEQ ID NO: 2701 - DNA, 60 bp, Artificial Sequence
  Description of Artificial Sequence: targeting sequence/synthetic sequence
atctctcccgaggccatcgttactgcggacggagctgattttcctatggattctagtaac

SEQ ID NO: 2702 - DNA, 60 bp, Artificial Sequence
  Description of Artificial Sequence: targeting sequence/synthetic sequence
atagacaccaaatcttactggaaggcacttggcatctccccattccatgagcatgcagag

SEQ ID NO: 2703 - DNA, 60 bp, Artificial Sequence
  Description of Artificial Sequence: targeting sequence/synthetic sequence
catgagaagattaagaagaaggatccaaagtgtatatttgcatgtgaagagatgtcagga

SEQ ID NO: 2704 - DNA, 60 bp, Artificial Sequence
  Description of Artificial Sequence: targeting sequence/synthetic sequence
ctgcacaacaacgaggccggccgcaggacggtgtacaacctggctgatgtggcctgcaag

SEQ ID NO: 2705 - DNA, 60 bp, Artificial Sequence
  Description of Artificial Sequence: targeting sequence/synthetic sequence
tctaggggctcagaatctggcatcttcacaaatacaaaggaatccagttctcatcaccct

SEQ ID NO: 2706 - DNA, 60 bp, Artificial Sequence
  Description of Artificial Sequence: targeting sequence/synthetic sequence
cccggcaccgtagccctgcgggagatccggcgctaccagaagtccacggagctgctgatc

SEQ ID NO: 2707 - DNA, 60 bp, Artificial Sequence
  Description of Artificial Sequence: targeting sequence/synthetic sequence
cagaccactccaccagcagccacggaagcacagaccactcaacccacaggcctggaggca

SEQ ID NO: 2708 - DNA, 60 bp, Artificial Sequence
  Description of Artificial Sequence: targeting sequence/synthetic sequence
aagtgcctggagagcggcatgaagaaggagatgatcatgtccgacgaggccgtggaggag

SEQ ID NO: 2709 - DNA, 60 bp, Artificial Sequence
  Description of Artificial Sequence: targeting sequence/synthetic sequence
accggcgtgaagatgagctccgagttcgaggtggagggcgccttcaagatgggcggagag

SEQ ID NO: 2710 - DNA, 60 bp, Artificial Sequence
  Description of Artificial Sequence: targeting sequence/synthetic sequence
gttctggaagttagtggttccaaggcagtagttcaggtatttgaagggacttcaggtata

SEQ ID NO: 2711 - DNA, 60 bp, Artificial Sequence
  Description of Artificial Sequence: targeting sequence/synthetic sequence
cccgactcctcaaccctgccacccccatggagtccccggcccctggaggccacagccccg

SEQ ID NO: 2712 - DNA, 60 bp, Artificial Sequence
  Description of Artificial Sequence: targeting sequence/synthetic sequence
ccccagccgctgcctgggactgaacccacttggactcctggccctgcccacagtgacttc

SEQ ID NO: 2713 - DNA, 60 bp, Artificial Sequence
  Description of Artificial Sequence: targeting sequence/synthetic sequence
ctggagttcaacagcaaggacttcatcgccgaggacatcaacgtgttcatgaaggacgat

SEQ ID NO: 2714 - DNA, 60 bp, Artificial Sequence
  Description of Artificial Sequence: targeting sequence/synthetic sequence
attcgtaagtccccacaggggggaatggagtggatcggatacatctttcacagtgggacc

SEQ ID NO: 2715 - DNA, 60 bp, Artificial Sequence
  Description of Artificial Sequence: targeting sequence/synthetic sequence
gcccagaaggaagccatctcccctccagatgcggcctcagctgctccactccgaacaatc

SEQ ID NO: 2716 - DNA, 60 bp, Artificial Sequence
  Description of Artificial Sequence: targeting sequence/synthetic sequence
gacagctccatgttcttaccccgagatgacctcagcccagccagggacctactggatgtg

SEQ ID NO: 2717 - DNA, 60 bp, Artificial Sequence
  Description of Artificial Sequence: targeting sequence/synthetic sequence
agggcatgcgaggctgccaagaaaacaaaagcagatgaccgaggaacagatgaaaagact

SEQ ID NO: 2718 - DNA, 60 bp, Artificial Sequence
  Description of Artificial Sequence: targeting sequence/synthetic sequence
cctcccgacaccacctccccggagcctcccaacaccacctccccggagtctcccgacacc

SEQ ID NO: 2719 - DNA, 60 bp, Artificial Sequence
  Description of Artificial Sequence: targeting sequence/synthetic sequence
gaggaaatggagttctttgagggccggtgcgagcggatgggcgaggccgacgagaccatg

SEQ ID NO: 2720 - DNA, 60 bp, Artificial Sequence
  Description of Artificial Sequence: targeting sequence/synthetic sequence
agcaagatggagcaggtgtctggcgtgctgggcatcgaggactactcggtcagccagacc

SEQ ID NO: 2721 - DNA, 60 bp, Artificial Sequence
  Description of Artificial Sequence: targeting sequence/synthetic sequence
gagaagtggcaggagcagtatgacgggagggagggacgtactgtggtccactgcctaaat

SEQ ID NO: 2722 - DNA, 60 bp, Artificial Sequence
  Description of Artificial Sequence: targeting sequence/synthetic sequence
aaagagggcaaggaggtcactttccagacggatgaggatgtgcccagtgggattgcagcc

SEQ ID NO: 2723 - DNA, 60 bp, Artificial Sequence
  Description of Artificial Sequence: targeting sequence/synthetic sequence
gtgtgggtgtcgtctgaggcatacacttcacctgtctctagggctcaatctgaaagtgag

SEQ ID NO: 2724 - DNA, 60 bp, Artificial Sequence
  Description of Artificial Sequence: targeting sequence/synthetic sequence
cccgaggcccccgagggcgtgcgggacttcccccggtgccggtacgtgcacaaggtgagc

SEQ ID NO: 2725 - DNA, 60 bp, Artificial Sequence
  Description of Artificial Sequence: targeting sequence/synthetic sequence
attgacgagtgtcagaacggcccagtgtgccagcgcaacgccgaatgcatcaacactgca

SEQ ID NO: 2726 - DNA, 60 bp, Artificial Sequence
  Description of Artificial Sequence: targeting sequence/synthetic sequence
gataacgaggcttatgtgcacgatgcacctgtacgatcactgaactgcacgctccgggac

SEQ ID NO: 2727 - DNA, 60 bp, Artificial Sequence
  Description of Artificial Sequence: targeting sequence/synthetic sequence
cccaagttcggccggtgccccctggccgctaaggaggaaagcatccccaagatccccgac

SEQ ID NO: 2728 - DNA, 60 bp, Artificial Sequence
  Description of Artificial Sequence: targeting sequence/synthetic sequence
caaggggatgttccagtcactgttactgtccacgacttcccaggcaaaaaactagtgctg

SEQ ID NO: 2729 - DNA, 60 bp, Artificial Sequence
  Description of Artificial Sequence: targeting sequence/synthetic sequence
accactcaacccacaggcctggaggcacagaccactgcaccagcagccatggaggcacag

SEQ ID NO: 2730 - DNA, 60 bp, Artificial Sequence
  Description of Artificial Sequence: targeting sequence/synthetic sequence
gcccacatgagcgaggaaggcaacgaggaatgggagtgcaagcggagctacagcgaccgg

SEQ ID NO: 2731 - DNA, 60 bp, Artificial Sequence
  Description of Artificial Sequence: targeting sequence/synthetic sequence
tccttctgcttctcagactctattccgacaccctccaacatggaggaaacgcaacagaaa

SEQ ID NO: 2732 - DNA, 60 bp, Artificial Sequence
  Description of Artificial Sequence: targeting sequence/synthetic sequence
aattcccagaaagcttccaaagcctgctgtgtgcccacaaagctagagcccatctccatc

SEQ ID NO: 2733 - DNA, 60 bp, Artificial Sequence
  Description of Artificial Sequence: targeting sequence/synthetic sequence
gaagacgacgccgcgcttcgggctggcagcagggggctctccgacccgtgggcagactca

SEQ ID NO: 2734 - DNA, 60 bp, Artificial Sequence
  Description of Artificial Sequence: targeting sequence/synthetic sequence
aaggaggtcactttccagacggatgaggatgtgcccagtgggattgcagccgagtccctg

SEQ ID NO: 2735 - DNA, 60 bp, Artificial Sequence
  Description of Artificial Sequence: targeting sequence/synthetic sequence
gggtgttgcagtgacggcaagaccccaagtttggacgccgagggatcgaattgcccagct

SEQ ID NO: 2736 - DNA, 60 bp, Artificial Sequence
  Description of Artificial Sequence: targeting sequence/synthetic sequence
ctcgaggacgaatgtgaggcgccgctggtgtgccgagcaggctgcagccctgagcatggc

SEQ ID NO: 2737 - DNA, 60 bp, Artificial Sequence
  Description of Artificial Sequence: targeting sequence/synthetic sequence
ggcgtgcgcctaagccccctcgctgagcgccagctacaggtgcagtgggagcctcccggg

SEQ ID NO: 2738 - DNA, 60 bp, Artificial Sequence
  Description of Artificial Sequence: targeting sequence/synthetic sequence
gccggcgccacccccaagaaagccaagaaagccgctggcgccaagaaagccgtgaagaaa

SEQ ID NO: 2739 - DNA, 60 bp, Artificial Sequence
  Description of Artificial Sequence: targeting sequence/synthetic sequence
ccaggtcctcctggtcctcaaggaccccctggcctccagggaccttctggtgctgctgat

SEQ ID NO: 2740 - DNA, 60 bp, Artificial Sequence
  Description of Artificial Sequence: targeting sequence/synthetic sequence
gaggagtatgcgaactgccacctggccagagccccgaatcacgctgtggtcacacggaaa

SEQ ID NO: 2741 - DNA, 60 bp, Artificial Sequence
  Description of Artificial Sequence: targeting sequence/synthetic sequence
ttactggactctgaaggccacattaaactcactgactacggcatgtgtaaggaaggatta

SEQ ID NO: 2742 - DNA, 60 bp, Artificial Sequence
  Description of Artificial Sequence: targeting sequence/synthetic sequence
tcagctgaaggagaacccagtgctgctcccacagatgtcaaggcgacaagtgtgtctgtg

SEQ ID NO: 2743 - DNA, 60 bp, Artificial Sequence
  Description of Artificial Sequence: targeting sequence/synthetic sequence
ttctacggcagcggcggaacctacgccctgagcctgagccagtacaacatgggcatcaac

SEQ ID NO: 2744 - DNA, 60 bp, Artificial Sequence
  Description of Artificial Sequence: targeting sequence/synthetic sequence
ctgccaggaccaagtggaagagatgggctcccgggtcctcctggttcccctgggccccct

SEQ ID NO: 2745 - DNA, 60 bp, Artificial Sequence
  Description of Artificial Sequence: targeting sequence/synthetic sequence
gtgtcagatgaggcagaacttcttgttaggggacccccaggcccacctgggatagtaatt

SEQ ID NO: 2746 - DNA, 60 bp, Artificial Sequence
  Description of Artificial Sequence: targeting sequence/synthetic sequence
cctgatgattcagcagttgatatggacgaatgcaaagaacccgatgtctgtaaacatgga

SEQ ID NO: 2747 - DNA, 60 bp, Artificial Sequence
  Description of Artificial Sequence: targeting sequence/synthetic sequence
ttcaagaatttccggccaggggtgcttagcagtggctgcgagttgccagagtctctgcag

SEQ ID NO: 2748 - DNA, 60 bp, Artificial Sequence
  Description of Artificial Sequence: targeting sequence/synthetic sequence
gaacgtgtccagctcactccagatgacgatgacattgtgaggaagattgatcagtctgaa

SEQ ID NO: 2749 - DNA, 60 bp, Artificial Sequence
  Description of Artificial Sequence: targeting sequence/synthetic sequence
ggcacccccgtggacgatctggaccggtgctgtcaggtgcacgacgagtgctacggcgag

SEQ ID NO: 2750 - DNA, 60 bp, Artificial Sequence
  Description of Artificial Sequence: targeting sequence/synthetic sequence
agcaaggagttcgaccagagcaagttcgtggagaccgacttcagcgagaaggcctgcttc

SEQ ID NO: 2751 - DNA, 60 bp, Artificial Sequence
  Description of Artificial Sequence: targeting sequence/synthetic sequence
gtgggcgagtctgcctcagtttcctcaggggagcctacggtaccgtgggacccctccagc

SEQ ID NO: 2752 - DNA, 60 bp, Artificial Sequence
  Description of Artificial Sequence: targeting sequence/synthetic sequence
gagaaaaacagcaccaagcaggagatcctggctgctcttgagaaaggctgcagcttcctg

SEQ ID NO: 2753 - DNA, 60 bp, Artificial Sequence
  Description of Artificial Sequence: targeting sequence/synthetic sequence
cccaagattctgattttagatgaggctacgtctgccctggattcagaaagcaagtcagct

SEQ ID NO: 2754 - DNA, 60 bp, Artificial Sequence
  Description of Artificial Sequence: targeting sequence/synthetic sequence
gatgagagtctaattaagtacaagaaaacgctgctgggagatggtcctgtggtgacagat

SEQ ID NO: 2755 - DNA, 60 bp, Artificial Sequence
  Description of Artificial Sequence: targeting sequence/synthetic sequence
ggattaccgggtgaaaaaggggaccatggctttccgggctcctcaggacccaggggagac

SEQ ID NO: 2756 - DNA, 60 bp, Artificial Sequence
  Description of Artificial Sequence: targeting sequence/synthetic sequence
gtcacagagatgttgggcagtggccagagccggagcccctgggctgatctgaccaatgag

SEQ ID NO: 2757 - DNA, 60 bp, Artificial Sequence
  Description of Artificial Sequence: targeting sequence/synthetic sequence
cgtaaaggcccctgtgatagatgtggacagtgtcgtttcggcgcactctgcgaagccgag

SEQ ID NO: 2758 - DNA, 60 bp, Artificial Sequence
  Description of Artificial Sequence: targeting sequence/synthetic sequence
aaaaccgacgacacggccgtgtattattgtgttagagatcttgagggggctggtaaatac

SEQ ID NO: 2759 - DNA, 60 bp, Artificial Sequence
  Description of Artificial Sequence: targeting sequence/synthetic sequence
gccatgggcatcatgaactccttcgtcaacgacatcttcgagcgcatcgcgggagaggct

SEQ ID NO: 2760 - DNA, 60 bp, Artificial Sequence
  Description of Artificial Sequence: targeting sequence/synthetic sequence
agcactgaagcaaccctgagctttggatatcttgatcctttcccacctgaggaacgtcct

SEQ ID NO: 2761 - DNA, 60 bp, Artificial Sequence
  Description of Artificial Sequence: targeting sequence/synthetic sequence
ctggtttgtgagagtgccccgggaccaatcaccatggaccttactggagatctggaagcc

SEQ ID NO: 2762 - DNA, 60 bp, Artificial Sequence
  Description of Artificial Sequence: targeting sequence/synthetic sequence
atggcagtcacagagatgttgggcagtggccagagccggagcccctgggctgatctgacc

SEQ ID NO: 2763 - DNA, 60 bp, Artificial Sequence
  Description of Artificial Sequence: targeting sequence/synthetic sequence
gatctaaaaaaatcattcaagagcccagaacccaggctctttactcctgaagaattcttt

SEQ ID NO: 2764 - DNA, 60 bp, Artificial Sequence
  Description of Artificial Sequence: targeting sequence/synthetic sequence
gccccaatccttcctgtctcccctatctgggaacctcctccagccacaacatcaacaact

SEQ ID NO: 2765 - DNA, 60 bp, Artificial Sequence
  Description of Artificial Sequence: targeting sequence/synthetic sequence
cttgatattgatgagtgccaactgggggtgcacagctgtggagagaatgccagctgcaca

SEQ ID NO: 2766 - DNA, 60 bp, Artificial Sequence
  Description of Artificial Sequence: targeting sequence/synthetic sequence
gagcagggggttgaggattcagcaaatgaagattcagtggatgctaagccagaccggtcc

SEQ ID NO: 2767 - DNA, 60 bp, Artificial Sequence
  Description of Artificial Sequence: targeting sequence/synthetic sequence
gaagatgaagaacacacaattatcacagatacggagttgccaccactgaaacttatgcat

SEQ ID NO: 2768 - DNA, 60 bp, Artificial Sequence
  Description of Artificial Sequence: targeting sequence/synthetic sequence
gtgaacccagtggctctgcctagagcccaggagggactgagacccgggacgctgtgcact

SEQ ID NO: 2769 - DNA, 60 bp, Artificial Sequence
  Description of Artificial Sequence: targeting sequence/synthetic sequence
gaaattatagcttcgctatctgtaaaagaacctacaaggatagaacttactcctaaaaga

SEQ ID NO: 2770 - DNA, 60 bp, Artificial Sequence
  Description of Artificial Sequence: targeting sequence/synthetic sequence
aagcggagagtggtccagcgggagaagcgggccgtgggcatcggcgccctgttcctgggc

SEQ ID NO: 2771 - DNA, 60 bp, Artificial Sequence
  Description of Artificial Sequence: targeting sequence/synthetic sequence
ctggacaatgtattactggactctgaaggccacattaaactcactgactacggcatgtgt

SEQ ID NO: 2772 - DNA, 60 bp, Artificial Sequence
  Description of Artificial Sequence: targeting sequence/synthetic sequence
agccacccccggctggacccagaggagatccagatggcagattatatttccaagaacgtg

SEQ ID NO: 2773 - DNA, 60 bp, Artificial Sequence
  Description of Artificial Sequence: targeting sequence/synthetic sequence
cccgactgtccgtcctgtgcgctggccgccctcccaaaggatgtacccaactctcagcca

SEQ ID NO: 2774 - DNA, 60 bp, Artificial Sequence
  Description of Artificial Sequence: targeting sequence/synthetic sequence
agcctggagcggcttcggagagggctagctgctggaaccagcaacccggaccctcccact

SEQ ID NO: 2775 - DNA, 60 bp, Artificial Sequence
  Description of Artificial Sequence: targeting sequence/synthetic sequence
tccaagaaggtcacggagctcctgaggaccttctgtgagagcaagaggctgaccacggac

SEQ ID NO: 2776 - DNA, 60 bp, Artificial Sequence
  Description of Artificial Sequence: targeting sequence/synthetic sequence
agccactggcccagctgctgccccagcaaagggcaggacacctctgaggagctgctgagg

SEQ ID NO: 2777 - DNA, 60 bp, Artificial Sequence
  Description of Artificial Sequence: targeting sequence/synthetic sequence
gacgaaaaggcagtgaggcctgggtaccccaagctcatccgagatgtctggggcatcgag

SEQ ID NO: 2778 - DNA, 60 bp, Artificial Sequence
  Description of Artificial Sequence: targeting sequence/synthetic sequence
cccaccaaggcccggagacgggtggtccagcgggagaagcgggccgtgggcatgctgggc

SEQ ID NO: 2779 - DNA, 60 bp, Artificial Sequence
  Description of Artificial Sequence: targeting sequence/synthetic sequence
atgtcgcctggggcctcagtgagggtctcctgcaagacctctggttacgcctttcacacc

SEQ ID NO: 2780 - DNA, 60 bp, Artificial Sequence
  Description of Artificial Sequence: targeting sequence/synthetic sequence
agcaagaaccagaagaccatctgccagcaagccgtggacaccgtgctggccaagaaacgg

SEQ ID NO: 2781 - DNA, 60 bp, Artificial Sequence
  Description of Artificial Sequence: targeting sequence/synthetic sequence
ggggtgaagaagccgcaccgctaccggcccggcaccgtagccctgcgggagatccggcgc

SEQ ID NO: 2782 - DNA, 60 bp, Artificial Sequence
  Description of Artificial Sequence: targeting sequence/synthetic sequence
aggggctctgagcccgaggaagaggaggatgtctcccaagccatccttttcccagccaca

SEQ ID NO: 2783 - DNA, 60 bp, Artificial Sequence
  Description of Artificial Sequence: targeting sequence/synthetic sequence
gaggacaagtggaacaagccccagaagacccggggccggagaggcaaccacaccatgaac

SEQ ID NO: 2784 - DNA, 60 bp, Artificial Sequence
  Description of Artificial Sequence: targeting sequence/synthetic sequence
tgggccagccagcggtgggtgttcaagaacgacggcagcatctacagcctgtacgacgat

SEQ ID NO: 2785 - DNA, 60 bp, Artificial Sequence
  Description of Artificial Sequence: targeting sequence/synthetic sequence
atctcttcgaaagctatgagcattatgaattctttcgtcactgatatctttgagcgtata

SEQ ID NO: 2786 - DNA, 60 bp, Artificial Sequence
  Description of Artificial Sequence: targeting sequence/synthetic sequence
acggccgtgtattattgtgttagagatcttgagggggctggtaaatacgactggtatttc

SEQ ID NO: 2787 - DNA, 60 bp, Artificial Sequence
  Description of Artificial Sequence: targeting sequence/synthetic sequence
tccgatgtgcgctgccttacaggcagcgaggaactctacaccatccacccgacgcccccg

SEQ ID NO: 2788 - DNA, 60 bp, Artificial Sequence
  Description of Artificial Sequence: targeting sequence/synthetic sequence
gagcactcggttcgctaccagtgtaagaactactacaaactgcgcacagaaggagatgga

SEQ ID NO: 2789 - DNA, 60 bp, Artificial Sequence
  Description of Artificial Sequence: targeting sequence/synthetic sequence
gtcagaagcactgaagcaaccctgagctttggatatcttgatcctttcccacctgaggaa

SEQ ID NO: 2790 - DNA, 60 bp, Artificial Sequence
  Description of Artificial Sequence: targeting sequence/synthetic sequence
ggaccccagggacccccaggaattccagggattcctggaattccaggaacaactgttatg

SEQ ID NO: 2791 - DNA, 60 bp, Artificial Sequence
  Description of Artificial Sequence: targeting sequence/synthetic sequence
gaagaacacacaattatcacagatacggagttgccaccactgaaacttatgcattcattt

SEQ ID NO: 2792 - DNA, 60 bp, Artificial Sequence
  Description of Artificial Sequence: targeting sequence/synthetic sequence
ggaggaacggcagaggtggcacccgacgcggtgcccaggagtggacgatcctgctggcgc

SEQ ID NO: 2793 - DNA, 60 bp, Artificial Sequence
  Description of Artificial Sequence: targeting sequence/synthetic sequence
cagcggtggctgttccggaacgacggcagcatctacaacctgcacgacgatatggtgatg

SEQ ID NO: 2794 - DNA, 60 bp, Artificial Sequence
  Description of Artificial Sequence: targeting sequence/synthetic sequence
gttgaggattcagcaaatgaagattcagtggatgctaagccagaccggtcctcgtttgta

SEQ ID NO: 2795 - DNA, 60 bp, Artificial Sequence
  Description of Artificial Sequence: targeting sequence/synthetic sequence
gccagccccccgagccagggggaggtgccgcccggcccgctgcccgaggccgtgctcgcc

SEQ ID NO: 2796 - DNA, 60 bp, Artificial Sequence
  Description of Artificial Sequence: targeting sequence/synthetic sequence
ctcatccggaagctgcccttccagaggttggtgagggagatcgcgcaggatttcaacact

SEQ ID NO: 2797 - DNA, 60 bp, Artificial Sequence
  Description of Artificial Sequence: targeting sequence/synthetic sequence
ccgggagcatctggctaccctggaaacccaggacttcccggaattcctggccaagacggc

SEQ ID NO: 2798 - DNA, 60 bp, Artificial Sequence
  Description of Artificial Sequence: targeting sequence/synthetic sequence
gacctgcagcccgtgggctcgggcgcctacggcgcggtgtgctcggccgtggacggccgc

SEQ ID NO: 2799 - DNA, 60 bp, Artificial Sequence
  Description of Artificial Sequence: targeting sequence/synthetic sequence
acagcagccctgggctgcctggtcaaggactacttccccgaaccggtgacggtgtcgtgg

SEQ ID NO: 2800 - DNA, 60 bp, Artificial Sequence
  Description of Artificial Sequence: targeting sequence/synthetic sequence
aacctctgtggggccatggacccctccgacggcattggagccctcatcgaggaggagcgc

SEQ ID NO: 2801 - DNA, 60 bp, Artificial Sequence
  Description of Artificial Sequence: targeting sequence/synthetic sequence
tcggttcgctaccagtgtaagaactactacaaactgcgcacagaaggagatggagtatac

SEQ ID NO: 2802 - DNA, 60 bp, Artificial Sequence
  Description of Artificial Sequence: targeting sequence/synthetic sequence
agcctgcagaccggcagcgaggaactgcggagcctgtacaacaccatcgccgtgctgtac

SEQ ID NO: 2803 - DNA, 60 bp, Artificial Sequence
  Description of Artificial Sequence: targeting sequence/synthetic sequence
aagacaacattgcaacaagaaaagccagatttctgctttttggaagaagatcctggaata

SEQ ID NO: 2804 - DNA, 60 bp, Artificial Sequence
  Description of Artificial Sequence: targeting sequence/synthetic sequence
gaagaacccttacagttcagggttcctggaacttctaccagtgccactctgacaggcctc

SEQ ID NO: 2805 - DNA, 60 bp, Artificial Sequence
  Description of Artificial Sequence: targeting sequence/synthetic sequence
ccggagctgcaactggaggagagctgtgcggaggcgcaggacggggagctggacgggctg

SEQ ID NO: 2806 - DNA, 60 bp, Artificial Sequence
  Description of Artificial Sequence: targeting sequence/synthetic sequence
gtgaggcctgggtaccccaagctcatccgagatgtctggggcatcgagggccccatcgat

SEQ ID NO: 2807 - DNA, 60 bp, Artificial Sequence
  Description of Artificial Sequence: targeting sequence/synthetic sequence
aagagcgaggacaagaaaaagagcgaggaagaccacaccgaggaaatcaacgacaagatc

SEQ ID NO: 2808 - DNA, 60 bp, Artificial Sequence
  Description of Artificial Sequence: targeting sequence/synthetic sequence
gagacttctgaggcagaaattcaccagagcttccagcacctcctgcgcaccctcaatcag

SEQ ID NO: 2809 - DNA, 60 bp, Artificial Sequence
  Description of Artificial Sequence: targeting sequence/synthetic sequence
cttcctcaagatggcaccagcaccctcagagaaaatagcaaaccggaagaaagccatttg

SEQ ID NO: 2810 - DNA, 60 bp, Artificial Sequence
  Description of Artificial Sequence: targeting sequence/synthetic sequence
gagaagggtgagaaaggagatccaggtcttattggtcctaagggagacatcggtgaaacc

SEQ ID NO: 2811 - DNA, 60 bp, Artificial Sequence
  Description of Artificial Sequence: targeting sequence/synthetic sequence
gcttatgtgcacgatgcacctgtacgatcactgaactgcacgctccgggactcacagcaa

SEQ ID NO: 2812 - DNA, 60 bp, Artificial Sequence
  Description of Artificial Sequence: targeting sequence/synthetic sequence
gatgccccaatccttcctgtctcccctatctgggaacctcctccagccacaacatcaaca

SEQ ID NO: 2813 - DNA, 60 bp, Artificial Sequence
  Description of Artificial Sequence: targeting sequence/synthetic sequence
attgatgagtgccaactgggggtgcacagctgtggagagaatgccagctgcacaaataca

SEQ ID NO: 2814 - DNA, 60 bp, Artificial Sequence
  Description of Artificial Sequence: targeting sequence/synthetic sequence
gaagagaaggaccctggaatgggtgcaatgggtggaatgggaggtggtatgggaggtggc

SEQ ID NO: 2815 - DNA, 60 bp, Artificial Sequence
  Description of Artificial Sequence: targeting sequence/synthetic sequence
tgggagaagatccggctgcggcccggcggaaagaaaaagtaccggctgaagcacctggtg

SEQ ID NO: 2816 - DNA, 60 bp, Artificial Sequence
  Description of Artificial Sequence: targeting sequence/synthetic sequence
aaacccaaaattttattgttggatgaggccacttcagccctcgataatgacagtgagaag

SEQ ID NO: 2817 - DNA, 60 bp, Artificial Sequence
  Description of Artificial Sequence: targeting sequence/synthetic sequence
acccacagttccgccaaaccttgcgggcaacaatccattcacttgggaggagtatttgaa

SEQ ID NO: 2818 - DNA, 60 bp, Artificial Sequence
  Description of Artificial Sequence: targeting sequence/synthetic sequence
ctcaactattgtgaggaggccgtggaggaggagacaggagatgggctggatgaggactca

SEQ ID NO: 2819 - DNA, 60 bp, Artificial Sequence
  Description of Artificial Sequence: targeting sequence/synthetic sequence
acctcccaggagcctcccgacaccacctcccaggagcctcccgacaccacctcccaggag

SEQ ID NO: 2820 - DNA, 60 bp, Artificial Sequence
  Description of Artificial Sequence: targeting sequence/synthetic sequence
ggtgaaggtggggcaggagcagatgaggaaaaggagcagtcgcacagacctttcctcatg

SEQ ID NO: 2821 - DNA, 60 bp, Artificial Sequence
  Description of Artificial Sequence: targeting sequence/synthetic sequence
aaggaggaaaagaaaagcgaggacaagaaaaagagcgaggaagaccacaccgaggaaatc

SEQ ID NO: 2822 - DNA, 60 bp, Artificial Sequence
  Description of Artificial Sequence: targeting sequence/synthetic sequence
cggcacgagatgaagaaccccgaggccagcaagctgaacaagcgggacggctgcagctcc

SEQ ID NO: 2823 - DNA, 60 bp, Artificial Sequence
  Description of Artificial Sequence: targeting sequence/synthetic sequence
ggctgggccagccagcggtggctgttccggaacgacggcagcatctacaacctgcacgac

SEQ ID NO: 2824 - DNA, 60 bp, Artificial Sequence
  Description of Artificial Sequence: targeting sequence/synthetic sequence
tctcaaggactcgtatgccctatgtctgtagatcaaaaggacactacgccttattctagc

SEQ ID NO: 2825 - DNA, 60 bp, Artificial Sequence
  Description of Artificial Sequence: targeting sequence/synthetic sequence
atcccttggccagaaggtgaagaaaagttatctgataatgctcaaagtgcagtagaaata

SEQ ID NO: 2826 - DNA, 60 bp, Artificial Sequence
  Description of Artificial Sequence: targeting sequence/synthetic sequence
taccaaattctccgaggtctaaagtatatacattcagctgacataattcacagggaccta

SEQ ID NO: 2827 - DNA, 60 bp, Artificial Sequence
  Description of Artificial Sequence: targeting sequence/synthetic sequence
gagtaccagttccagcaccagcccagtcaggaggagtgtgaaggcagctccctgtcggct

SEQ ID NO: 2828 - DNA, 60 bp, Artificial Sequence
  Description of Artificial Sequence: targeting sequence/synthetic sequence
tgcttctcagactctattccgacaccctccaacatggaggaaacgcaacagaaatccaat

SEQ ID NO: 2829 - DNA, 60 bp, Artificial Sequence
  Description of Artificial Sequence: targeting sequence/synthetic sequence
ctgtgctcagattcagaagaggaaatgaaagcattagaagcagatttcttgaccaatatg

SEQ ID NO: 2830 - DNA, 60 bp, Artificial Sequence
  Description of Artificial Sequence: targeting sequence/synthetic sequence
cggcgggaacggaaggctgccttcaagggggattccggaggccccctgctgtgtaacaat

SEQ ID NO: 2831 - DNA, 60 bp, Artificial Sequence
  Description of Artificial Sequence: targeting sequence/synthetic sequence
atggaggcacagaccactgcaccagaagccacggaggcacagaccactcaacccacagcc

SEQ ID NO: 2832 - DNA, 60 bp, Artificial Sequence
  Description of Artificial Sequence: targeting sequence/synthetic sequence
gcaccagaagccacggaggcacagaccactcaacccacagccacggaggcacagaccact

SEQ ID NO: 2833 - DNA, 60 bp, Artificial Sequence
  Description of Artificial Sequence: targeting sequence/synthetic sequence
gcacagttcaagccgcacacagatgaggacctggtgtacttggagcctagccccgacttc

SEQ ID NO: 2834 - DNA, 60 bp, Artificial Sequence
  Description of Artificial Sequence: targeting sequence/synthetic sequence
acctccgaaccgcatgcacaactggaggagaacttctgccggaacccagatggggatagc

SEQ ID NO: 2835 - DNA, 60 bp, Artificial Sequence
  Description of Artificial Sequence: targeting sequence/synthetic sequence
gatgaccagccgccatcaatcctggaccccccagaccaggtgcagtttgagaagtgtggc

SEQ ID NO: 2836 - DNA, 60 bp, Artificial Sequence
  Description of Artificial Sequence: targeting sequence/synthetic sequence
gggtactgcgacctcaactattgtgaggaggccgtggaggaggagacaggagatgggctg

SEQ ID NO: 2837 - DNA, 60 bp, Artificial Sequence
  Description of Artificial Sequence: targeting sequence/synthetic sequence
tttcagaagctgccagaggaggagccagaaacagatctcagccccgggctcccagctgcc

SEQ ID NO: 2838 - DNA, 60 bp, Artificial Sequence
  Description of Artificial Sequence: targeting sequence/synthetic sequence
aagctgccagaggaggagccagaaacagatctcagccccgggctcccagctgcccacctc

SEQ ID NO: 2839 - DNA, 60 bp, Artificial Sequence
  Description of Artificial Sequence: targeting sequence/synthetic sequence
ccctccactcagctgagtgcagacccatctcttgatgggcttccggcagcagaagacatg

SEQ ID NO: 2840 - DNA, 60 bp, Artificial Sequence
  Description of Artificial Sequence: targeting sequence/synthetic sequence
tctgaaggaggctgtcctctcatccttacccaagaactggggaaagccaacactactgac

SEQ ID NO: 2841 - DNA, 60 bp, Artificial Sequence
  Description of Artificial Sequence: targeting sequence/synthetic sequence
gtctgccggtgctcagaaggctaccaaggagatgggattcactgtcttgatattgatgag

SEQ ID NO: 2842 - DNA, 60 bp, Artificial Sequence
  Description of Artificial Sequence: targeting sequence/synthetic sequence
cagcccgactcctcaaccctgccacccccatggagtccccggcccctggaggccacagcc

SEQ ID NO: 2843 - DNA, 60 bp, Artificial Sequence
  Description of Artificial Sequence: targeting sequence/synthetic sequence
ggagtcagctgccaagagacagctgtaacccagacttacggtggcaactcaaatggagag

SEQ ID NO: 2844 - DNA, 60 bp, Artificial Sequence
  Description of Artificial Sequence: targeting sequence/synthetic sequence
tccacatttgaaagcaagagctataaaatggcagatgaggccggaagtgaagccgatcat

SEQ ID NO: 2845 - DNA, 60 bp, Artificial Sequence
  Description of Artificial Sequence: targeting sequence/synthetic sequence
gcagttccggatgccccaatccttcctgtctcccctatctgggaacctcctccagccaca

SEQ ID NO: 2846 - DNA, 60 bp, Artificial Sequence
  Description of Artificial Sequence: targeting sequence/synthetic sequence
atctgttcagctgaaggagaacccagtgctgctcccacagatgtcaaggcgacaagtgtg

SEQ ID NO: 2847 - DNA, 60 bp, Artificial Sequence
  Description of Artificial Sequence: targeting sequence/synthetic sequence
gaacccagtgctgctcccacagatgtcaaggcgacaagtgtgtctgtgtcagagattctt

SEQ ID NO: 2848 - DNA, 60 bp, Artificial Sequence
  Description of Artificial Sequence: targeting sequence/synthetic sequence
ggggaagacgacgccgcgcttcgggctggcagcagggggctctccgacccgtgggcagac

SEQ ID NO: 2849 - DNA, 60 bp, Artificial Sequence
  Description of Artificial Sequence: targeting sequence/synthetic sequence
cccgtcctgcacagcccgacctccccggagcctcccgacaccacctccccggagcctccc

SEQ ID NO: 2850 - DNA, 60 bp, Artificial Sequence
  Description of Artificial Sequence: targeting sequence/synthetic sequence
cacagcccgacctccccggagcctcccgacaccacctccccggagcctcccaacaccacc

SEQ ID NO: 2851 - DNA, 60 bp, Artificial Sequence
  Description of Artificial Sequence: targeting sequence/synthetic sequence
ccgacctccccggagcctcccgacaccacctccccggagcctcccaacaccacctccccg

SEQ ID NO: 2852 - DNA, 60 bp, Artificial Sequence
  Description of Artificial Sequence: targeting sequence/synthetic sequence
ccggagcctcccgacaccacctccccggagcctcccaacaccacctccccggagtctccc

SEQ ID NO: 2853 - DNA, 60 bp, Artificial Sequence
  Description of Artificial Sequence: targeting sequence/synthetic sequence
tccccggagtctcccgacaccacctcccaggagcctcccgacaccacctcccaggagcct

SEQ ID NO: 2854 - DNA, 60 bp, Artificial Sequence
  Description of Artificial Sequence: targeting sequence/synthetic sequence
caggagcctcccgacaccacctccccggagcctcccgacaagacctccccggagcccgcc

SEQ ID NO: 2855 - DNA, 60 bp, Artificial Sequence
  Description of Artificial Sequence: targeting sequence/synthetic sequence
ggacctccaggtgaccagggtcctcctggaattccagggcagccaggatttataggcgaa

SEQ ID NO: 2856 - DNA, 60 bp, Artificial Sequence
  Description of Artificial Sequence: targeting sequence/synthetic sequence
gagaagggatcccgaggagaccctgggaccccaggagtgcctggaaaggacgggcaggca

SEQ ID NO: 2857 - DNA, 60 bp, Artificial Sequence
  Description of Artificial Sequence: targeting sequence/synthetic sequence
ggactgcgtggtgaaaagggagatcaagggatagcgggtttcccaggaagccctggagag

SEQ ID NO: 2858 - DNA, 60 bp, Artificial Sequence
  Description of Artificial Sequence: targeting sequence/synthetic sequence
tgccttacaggcagcgaggaactctacaccatccacccgacgcccccggccggcgacggc

SEQ ID NO: 2859 - DNA, 60 bp, Artificial Sequence
  Description of Artificial Sequence: targeting sequence/synthetic sequence
atggattccacagtcacgccggcccccagtgatgctagtggaatttgggaacctggatcc

SEQ ID NO: 2860 - DNA, 60 bp, Artificial Sequence
  Description of Artificial Sequence: targeting sequence/synthetic sequence
gtcacgccggcccccagtgatgctagtggaatttgggaacctggatcccaggtgtttgaa

SEQ ID NO: 2861 - DNA, 60 bp, Artificial Sequence
  Description of Artificial Sequence: targeting sequence/synthetic sequence
gcccccagtgatgctagtggaatttgggaacctggatcccaggtgtttgaagaagccgaa

SEQ ID NO: 2862 - DNA, 60 bp, Artificial Sequence
  Description of Artificial Sequence: targeting sequence/synthetic sequence
gaggacgaatgtgaggcgccgctggtgtgccgagcaggctgcagccctgagcatggcttc

SEQ ID NO: 2863 - DNA, 60 bp, Artificial Sequence
  Description of Artificial Sequence: targeting sequence/synthetic sequence
cacaccgtggagaatgggacagggcccagcagtgccccagacaggggcgtgaatgggaca

SEQ ID NO: 2864 - DNA, 60 bp, Artificial Sequence
  Description of Artificial Sequence: targeting sequence/synthetic sequence
tgggagcggatccggctgcggcccggcagcaagaaagcctaccggctgaagcacctggtg

SEQ ID NO: 2865 - DNA, 60 bp, Artificial Sequence
  Description of Artificial Sequence: targeting sequence/synthetic sequence
gtgaccacagaggccgctttcggcctggtgtgcgccacctgcgagcagatcgccgacagc

SEQ ID NO: 2866 - DNA, 60 bp, Artificial Sequence
  Description of Artificial Sequence: targeting sequence/synthetic sequence
accacagaggccgctttcggcctggtgtgcgccacctgcgagcagatcgccgacagccag

SEQ ID NO: 2867 - DNA, 60 bp, Artificial Sequence
  Description of Artificial Sequence: targeting sequence/synthetic sequence
gccacctgcgagcagatcgccgacagccagcaccagagccaccggcagatggtgaccaca

SEQ ID NO: 2868 - DNA, 60 bp, Artificial Sequence
  Description of Artificial Sequence: targeting sequence/synthetic sequence
aaggagaaggagaaagaggaacaagaagagagagagacaaagacaccagagtgtccgagc

SEQ ID NO: 2869 - DNA, 60 bp, Artificial Sequence
  Description of Artificial Sequence: targeting sequence/synthetic sequence
aaggaccttcacccattgtttgatgagacctttgaattcctggtgcctgctgagccgtgc

SEQ ID NO: 2870 - DNA, 60 bp, Artificial Sequence
  Description of Artificial Sequence: targeting sequence/synthetic sequence
ccagcccccatcgagaaaaccatctccaaaaccaaaggacagccccgagaaccacaggtg

SEQ ID NO: 2871 - DNA, 60 bp, Artificial Sequence
  Description of Artificial Sequence: targeting sequence/synthetic sequence
ctgaccacagccggcgtggccatgggcaccgccagcctgaccctgagcgcccagagccgg

SEQ ID NO: 2872 - DNA, 60 bp, Artificial Sequence
  Description of Artificial Sequence: targeting sequence/synthetic sequence
gaggacagcggccacgagaccggcatcgacagccagagccagggcagcttccaggccccc

SEQ ID NO: 2873 - DNA, 60 bp, Artificial Sequence
  Description of Artificial Sequence: targeting sequence/synthetic sequence
caaggacaggatgacttgttggagaacattaaaaggaaggtttcatcttcaaaaccagaa

SEQ ID NO: 2874 - DNA, 60 bp, Artificial Sequence
  Description of Artificial Sequence: targeting sequence/synthetic sequence
ttcctggccaccgccggcagcgccatgggcggagccagcctgaccctgagcgcccagagc

SEQ ID NO: 2875 - DNA, 60 bp, Artificial Sequence
  Description of Artificial Sequence: targeting sequence/synthetic sequence
cctactgagattgtgcagacaaatggagagacagaaccagctccactagagaccaaaccg

SEQ ID NO: 2876 - DNA, 60 bp, Artificial Sequence
  Description of Artificial Sequence: targeting sequence/synthetic sequence
ggaaaccctggtgctgatggacagcctggtgctaaaggtgccaatggtgctcctggtatt

SEQ ID NO: 2877 - DNA, 60 bp, Artificial Sequence
  Description of Artificial Sequence: targeting sequence/synthetic sequence
cctggccccattggtaatgttggtgctcctggagccaaaggtgctcgcggcagcgctggt

SEQ ID NO: 2878 - DNA, 60 bp, Artificial Sequence
  Description of Artificial Sequence: targeting sequence/synthetic sequence
gaggagctgggggctgtgacagtcaaggcctcctaccgcgcctctgagcagaagctgcgt

SEQ ID NO: 2879 - DNA, 60 bp, Artificial Sequence
  Description of Artificial Sequence: targeting sequence/synthetic sequence
ctggctgaggatccccagggagatgctgcccagaagacagatacatcccaccatgatcag

SEQ ID NO: 2880 - DNA, 60 bp, Artificial Sequence
  Description of Artificial Sequence: targeting sequence/synthetic sequence
cctggacctaaaggtgctgctggagagcccggcaaggctggagagcgaggtgttcccgga

SEQ ID NO: 2881 - DNA, 60 bp, Artificial Sequence
  Description of Artificial Sequence: targeting sequence/synthetic sequence
gtcatgggccccaacgccaccgctgaggagggcgcaccctctgctgcagcactggccacc

SEQ ID NO: 2882 - DNA, 60 bp, Artificial Sequence
  Description of Artificial Sequence: targeting sequence/synthetic sequence
aactgcaggcacgagagagacgctggtgtggtctgcaccaatgaaaccaggagcacccac

SEQ ID NO: 2883 - DNA, 60 bp, Artificial Sequence
  Description of Artificial Sequence: targeting sequence/synthetic sequence
gtagaccccaaaagtaaggaagaagataaacacctgaaatttcgtatttctcatgaatta

SEQ ID NO: 2884 - DNA, 60 bp, Artificial Sequence
  Description of Artificial Sequence: targeting sequence/synthetic sequence
ccccaagactcaagcttggtggaaactcccccggctgagaacaagcccagaaagcggcag

SEQ ID NO: 2885 - DNA, 60 bp, Artificial Sequence
  Description of Artificial Sequence: targeting sequence/synthetic sequence
cccatcgagaaaaccatctccaaaaccaaaggacagccccgagaaccacaggtgtacacc

SEQ ID NO: 2886 - DNA, 60 bp, Artificial Sequence
  Description of Artificial Sequence: targeting sequence/synthetic sequence
gtggccaagcgggtgcaggaccacacgacggttgtgggtgatgtagtgtccccagagatg

SEQ ID NO: 2887 - DNA, 60 bp, Artificial Sequence
  Description of Artificial Sequence: targeting sequence/synthetic sequence
tccaaggttctgcagattgagaaggaaggggccatccatagagaggagctggtctatgaa

SEQ ID NO: 2888 - DNA, 60 bp, Artificial Sequence
  Description of Artificial Sequence: targeting sequence/synthetic sequence
gccgacagcttcgtgatccggggcgacgaggtgcggcagatcgcccccggccagaccggc

SEQ ID NO: 2889 - DNA, 60 bp, Artificial Sequence
  Description of Artificial Sequence: targeting sequence/synthetic sequence
acctctgaggagctgggggctgtgacagtcaaggcctcctaccgcgcctctgagcagaag

SEQ ID NO: 2890 - DNA, 60 bp, Artificial Sequence
  Description of Artificial Sequence: targeting sequence/synthetic sequence
tgcaggcacgagagagacgctggtgtggtctgcaccaatgaaaccaggagcacccacacc

SEQ ID NO: 2891 - DNA, 60 bp, Artificial Sequence
  Description of Artificial Sequence: targeting sequence/synthetic sequence
agggagagagaagtggacaacaaccgtgagccccacagcgctgagagtgatgtgactcgc

SEQ ID NO: 2892 - DNA, 60 bp, Artificial Sequence
  Description of Artificial Sequence: targeting sequence/synthetic sequence
acaacagctggaggaacggcagaggtggcacccgacgcggtgcccaggagtggacgatcc

SEQ ID NO: 2893 - DNA, 60 bp, Artificial Sequence
  Description of Artificial Sequence: targeting sequence/synthetic sequence
ttccctgtgggagatgcggtgtccaaggttctgcagattgagaaggaaggggccatccat

SEQ ID NO: 2894 - DNA, 60 bp, Artificial Sequence
  Description of Artificial Sequence: targeting sequence/synthetic sequence
cctgtgtctaccaagcctgtggaggatgatgtggacgtggccagtgagcggcagcgagtg

SEQ ID NO: 2895 - DNA, 60 bp, Artificial Sequence
  Description of Artificial Sequence: targeting sequence/synthetic sequence
aagcgggtgcaggaccacacgacggttgtgggtgatgtagtgtccccagagatgggcgag

SEQ ID NO: 2896 - DNA, 60 bp, Artificial Sequence
  Description of Artificial Sequence: targeting sequence/synthetic sequence
aaagtgaccacaaatggccctactgagattgtgcagacaaatggagagacagaaccagct

SEQ ID NO: 2897 - DNA, 60 bp, Artificial Sequence
  Description of Artificial Sequence: targeting sequence/synthetic sequence
cttacgctggcggcgccgggggaggtccgtgggccggagggagagcaacaggatgcggga

SEQ ID NO: 2898 - DNA, 60 bp, Artificial Sequence
  Description of Artificial Sequence: targeting sequence/synthetic sequence
atggcccacgtctctgtggtccctgtctcctcagaagggacccccagcagggagccagtg

SEQ ID NO: 2899 - DNA, 60 bp, Artificial Sequence
  Description of Artificial Sequence: targeting sequence/synthetic sequence
gggccacagccggcggaggggccacaaaccgctgagggaccacagcccccagagaggaaa

SEQ ID NO: 2900 - DNA, 60 bp, Artificial Sequence
  Description of Artificial Sequence: targeting sequence/synthetic sequence
ggagatgcggtgtccaaggttctgcagattgagaaggaaggggccatccatagagaggag

SEQ ID NO: 2901 - DNA, 60 bp, Artificial Sequence
  Description of Artificial Sequence: targeting sequence/synthetic sequence
gctccttctctgagtggtaaaggcaatcctgaggaagaggatgtggatacctcccaagtc

SEQ ID NO: 2902 - DNA, 60 bp, Artificial Sequence
  Description of Artificial Sequence: targeting sequence/synthetic sequence
tctaccaagcctgtggaggatgatgtggacgtggccagtgagcggcagcgagtgctccgg

SEQ ID NO: 2903 - DNA, 60 bp, Artificial Sequence
  Description of Artificial Sequence: targeting sequence/synthetic sequence
gctggccctgctggaaaccctggtgctgatggacagcctggtgctaaaggtgccaatggt

SEQ ID NO: 2904 - DNA, 60 bp, Artificial Sequence
  Description of Artificial Sequence: targeting sequence/synthetic sequence
acccaacagccccagcaagatgagatgcctagcccgaccctcctcacccaggtgaaggaa

SEQ ID NO: 2905 - DNA, 60 bp, Artificial Sequence
  Description of Artificial Sequence: targeting sequence/synthetic sequence
gccactaccacagctccttctctgagtggtaaaggcaatcctgaggaagaggatgtggat

SEQ ID NO: 2906 - DNA, 60 bp, Artificial Sequence
  Description of Artificial Sequence: targeting sequence/synthetic sequence
cgaggggccaacggtgctcccggcaacgatggtgctaagggtgatgctggtgcccctgga

SEQ ID NO: 2907 - DNA, 60 bp, Artificial Sequence
  Description of Artificial Sequence: targeting sequence/synthetic sequence
ttcaaacaaggacaggatgacttgttggagaacattaaaaggaaggtttcatcttcaaaa

SEQ ID NO: 2908 - DNA, 60 bp, Artificial Sequence
  Description of Artificial Sequence: targeting sequence/synthetic sequence
gagtctgcctctgaagattgcatggccaaagagctgcctgaacacacagtaaaactctgt

SEQ ID NO: 2909 - DNA, 60 bp, Artificial Sequence
  Description of Artificial Sequence: targeting sequence/synthetic sequence
cgggtcaccacggtggcttcccacacttctgactcggacgttccttccggtgtcactgag

SEQ ID NO: 2910 - DNA, 60 bp, Artificial Sequence
  Description of Artificial Sequence: targeting sequence/synthetic sequence
ggcagcatggcccacgtctctgtggtccctgtctcctcagaagggacccccagcagggag

SEQ ID NO: 2911 - DNA, 60 bp, Artificial Sequence
  Description of Artificial Sequence: targeting sequence/synthetic sequence
ctggcggcgccgggggaggtccgtgggccggagggagagcaacaggatgcgggagacttc

SEQ ID NO: 2912 - DNA, 60 bp, Artificial Sequence
  Description of Artificial Sequence: targeting sequence/synthetic sequence
accacggtggcttcccacacttctgactcggacgttccttccggtgtcactgaggtggtc

SEQ ID NO: 2913 - DNA, 60 bp, Artificial Sequence
  Description of Artificial Sequence: targeting sequence/synthetic sequence
accgagaggaccgtggacaagtccaccgagggggaggtgagcgccgacgaggagggcttt

SEQ ID NO: 2914 - DNA, 60 bp, Artificial Sequence
  Description of Artificial Sequence: targeting sequence/synthetic sequence
gaggatccccagggagatgctgcccagaagacagatacatcccaccatgatcaggatcac

SEQ ID NO: 2915 - DNA, 60 bp, Artificial Sequence
  Description of Artificial Sequence: targeting sequence/synthetic sequence
ggggctgcaggtgctcggggtaatgacggtgctcgaggcagtgatggtcaaccaggccct

SEQ ID NO: 2916 - DNA, 60 bp, Artificial Sequence
  Description of Artificial Sequence: targeting sequence/synthetic sequence
ggcgagaagaacatggaggacagcggccacgagaccggcatcgacagccagagccagggc

SEQ ID NO: 2917 - DNA, 60 bp, Artificial Sequence
  Description of Artificial Sequence: targeting sequence/synthetic sequence
aaaagtaaggaagaagataaacacctgaaatttcgtatttctcatgaattagatagtgca

SEQ ID NO: 2918 - DNA, 60 bp, Artificial Sequence
  Description of Artificial Sequence: targeting sequence/synthetic sequence
gaaaaagtgaccacaaatggccctactgagattgtgcagacaaatggagagacagaacca

SEQ ID NO: 2919 - DNA, 60 bp, Artificial Sequence
  Description of Artificial Sequence: targeting sequence/synthetic sequence
ccactgccccaagactcaagcttggtggaaactcccccggctgagaacaagcccagaaag

SEQ ID NO: 2920 - DNA, 60 bp, Artificial Sequence
  Description of Artificial Sequence: targeting sequence/synthetic sequence
cctggtcttcctggcccctctggtgaacctggcaaacaaggtccctctggagcaagtggt

SEQ ID NO: 2921 - DNA, 60 bp, Artificial Sequence
  Description of Artificial Sequence: targeting sequence/synthetic sequence
gctgctggccctgctggaaaccctggtgctgatggacagcctggtgctaaaggtgccaat

SEQ ID NO: 2922 - DNA, 60 bp, Artificial Sequence
  Description of Artificial Sequence: targeting sequence/synthetic sequence
cctggtgccgcttctgcagctgccgcctctgctgaagaaggaaccgcggctgctgctgct

SEQ ID NO: 2923 - DNA, 60 bp, Artificial Sequence
  Description of Artificial Sequence: targeting sequence/synthetic sequence
gcaggaccttgtgagcaggccgagtgtggtagcggagggagtggctccggggaagacggt

SEQ ID NO: 2924 - DNA, 60 bp, Artificial Sequence
  Description of Artificial Sequence: targeting sequence/synthetic sequence
gctgcttctccacctggtgccgcttctgcagctgccgcctctgctgaagaaggaaccgcg

SEQ ID NO: 2925 - DNA, 60 bp, Artificial Sequence
  Description of Artificial Sequence: targeting sequence/synthetic sequence
gaggcaggtgagagcagtcacgaggaggacacggatggccacgtggctgcggggtcgact

SEQ ID NO: 2926 - DNA, 60 bp, Artificial Sequence
  Description of Artificial Sequence: targeting sequence/synthetic sequence
acccagcacgaggcgggaagcacctcctgggacgggtcgctgagtccccaggctgccacc

SEQ ID NO: 2927 - DNA, 60 bp, Artificial Sequence
  Description of Artificial Sequence: targeting sequence/synthetic sequence
ccccagcaagatgagatgcctagcccgaccctcctcacccaggtgaaggaatctctctcc

SEQ ID NO: 2928 - DNA, 60 bp, Artificial Sequence
  Description of Artificial Sequence: targeting sequence/synthetic sequence
gccgacagcttcgtggtcaagggcgacgatgtgcggcagatcgcccccggccagaccggc

SEQ ID NO: 2929 - DNA, 60 bp, Artificial Sequence
  Description of Artificial Sequence: targeting sequence/synthetic sequence
acttcacaagatagggagagagaagtggacaacaaccgtgagccccacagcgctgagagt

SEQ ID NO: 2930 - DNA, 60 bp, Artificial Sequence
  Description of Artificial Sequence: targeting sequence/synthetic sequence
gatgcggtgtccaaggttctgcagattgagaaggaaggggccatccatagagaggagctg

SEQ ID NO: 2931 - DNA, 60 bp, Artificial Sequence
  Description of Artificial Sequence: targeting sequence/synthetic sequence
tgtgagtctgcctctgaagattgcatggccaaagagctgcctgaacacacagtaaaactc

SEQ ID NO: 2932 - DNA, 60 bp, Artificial Sequence
  Description of Artificial Sequence: targeting sequence/synthetic sequence
cctgtctccctggctgaggatccccagggagatgctgcccagaagacagatacatcccac

SEQ ID NO: 2933 - DNA, 60 bp, Artificial Sequence
  Description of Artificial Sequence: targeting sequence/synthetic sequence
tcccacgaggtcacccagcacgaggcgggaagcacctcctgggacgggtcgctgagtccc

SEQ ID NO: 2934 - DNA, 60 bp, Artificial Sequence
  Description of Artificial Sequence: targeting sequence/synthetic sequence
gagaagaacatggaggacagcggccacgagaccggcatcgacagccagagccagggcagc

SEQ ID NO: 2935 - DNA, 60 bp, Artificial Sequence
  Description of Artificial Sequence: targeting sequence/synthetic sequence
gagagagaagtggacaacaaccgtgagccccacagcgctgagagtgatgtgactcgcttt

SEQ ID NO: 2936 - DNA, 60 bp, Artificial Sequence
  Description of Artificial Sequence: targeting sequence/synthetic sequence
cacgagcacgagcacgagcacgagcacgagggcggaggcggaggcaagctggccctgaag

SEQ ID NO: 2937 - DNA, 60 bp, Artificial Sequence
  Description of Artificial Sequence: targeting sequence/synthetic sequence
accacagctccttctctgagtggtaaaggcaatcctgaggaagaggatgtggatacctcc

SEQ ID NO: 2938 - DNA, 60 bp, Artificial Sequence
  Description of Artificial Sequence: targeting sequence/synthetic sequence
cccggtgaagctggtctgcctggtgccaagggtctgactggaagccctggcagccctggt

SEQ ID NO: 2939 - DNA, 60 bp, Artificial Sequence
  Description of Artificial Sequence: targeting sequence/synthetic sequence
gatccccagggagatgctgcccagaagacagatacatcccaccatgatcaggatcaccca

SEQ ID NO: 2940 - DNA, 60 bp, Artificial Sequence
  Description of Artificial Sequence: targeting sequence/synthetic sequence
aggaccgtggacaagtccaccgagggggaggtgagcgccgacgaggagggctttgagaac

SEQ ID NO: 2941 - DNA, 60 bp, Artificial Sequence
  Description of Artificial Sequence: targeting sequence/synthetic sequence
cccaacgccaccgctgaggagggcgcaccctctgctgcagcactggccaccccggacacg

SEQ ID NO: 2942 - DNA, 60 bp, Artificial Sequence
  Description of Artificial Sequence: targeting sequence/synthetic sequence
gccaccgctgaggagggcgcaccctctgctgcagcactggccaccccggacacgctgcag

SEQ ID NO: 2943 - DNA, 60 bp, Artificial Sequence
  Description of Artificial Sequence: targeting sequence/synthetic sequence
gtgaccacaaatggccctactgagattgtgcagacaaatggagagacagaaccagctcca

SEQ ID NO: 2944 - DNA, 60 bp, Artificial Sequence
  Description of Artificial Sequence: targeting sequence/synthetic sequence
gaccacacgacggttgtgggtgatgtagtgtccccagagatgggcgagagtctgttccag

SEQ ID NO: 2945 - DNA, 60 bp, Artificial Sequence
  Description of Artificial Sequence: targeting sequence/synthetic sequence
acaaatggccctactgagattgtgcagacaaatggagagacagaaccagctccactagag

SEQ ID NO: 2946 - DNA, 60 bp, Artificial Sequence
  Description of Artificial Sequence: targeting sequence/synthetic sequence
gaagtgacaacaacagctggaggaacggcagaggtggcacccgacgcggtgcccaggagt

SEQ ID NO: 2947 - DNA, 60 bp, Artificial Sequence
  Description of Artificial Sequence: targeting sequence/synthetic sequence
ggggtcctctgtgaacttgctcaggacaaggaagctgcagaagctattgaagctgaggga

SEQ ID NO: 2948 - DNA, 60 bp, Artificial Sequence
  Description of Artificial Sequence: targeting sequence/synthetic sequence
agggtcaccgagaggaccgtggacaagtccaccgagggggaggtgagcgccgacgaggag

SEQ ID NO: 2949 - DNA, 60 bp, Artificial Sequence
  Description of Artificial Sequence: targeting sequence/synthetic sequence
gagcacgagcacgagcacgagcacgagcacgagcacgagggcggaggcggaggcaagctg

SEQ ID NO: 2950 - DNA, 60 bp, Artificial Sequence
  Description of Artificial Sequence: targeting sequence/synthetic sequence
cctccagcaaagaaagcagcagagagctcttcagacagctcagactctgacagctctgag

SEQ ID NO: 2951 - DNA, 60 bp, Artificial Sequence
  Description of Artificial Sequence: targeting sequence/synthetic sequence
gcaaagaaagcagcagagagctcttcagacagctcagactctgacagctctgaggatgat

SEQ ID NO: 2952 - DNA, 60 bp, Artificial Sequence
  Description of Artificial Sequence: targeting sequence/synthetic sequence
gaagaggccagggcaggaccttgtgagcaggccgagtgtggtagcggagggagtggctcc

SEQ ID NO: 2953 - DNA, 60 bp, Artificial Sequence
  Description of Artificial Sequence: targeting sequence/synthetic sequence
ccgtccacccaggacccctccacccaggcctccactgcgtcctccccagccccagaggag

SEQ ID NO: 2954 - DNA, 60 bp, Artificial Sequence
  Description of Artificial Sequence: targeting sequence/synthetic sequence
cacgagcacgagcacgagcacgagcacgagcacgagggcggaggcggaggcaagctggcc

SEQ ID NO: 2955 - DNA, 60 bp, Artificial Sequence
  Description of Artificial Sequence: targeting sequence/synthetic sequence
cctggcccagctggccagcctggagataagggtgaaggtggtgcccccggacttccaggt

SEQ ID NO: 2956 - DNA, 60 bp, Artificial Sequence
  Description of Artificial Sequence: targeting sequence/synthetic sequence
cccgccttgcccgaggatggcggcagcggcgccttcccgcccggccacttcaaggacccc

SEQ ID NO: 2957 - DNA, 60 bp, Artificial Sequence
  Description of Artificial Sequence: targeting sequence/synthetic sequence
accacgctgcccgccttgcccgaggatggcggcagcggcgccttcccgcccggccacttc

SEQ ID NO: 2958 - DNA, 60 bp, Artificial Sequence
  Description of Artificial Sequence: targeting sequence/synthetic sequence
gcggtgtccaaggttctgcagattgagaaggaaggggccatccatagagaggagctggtc

SEQ ID NO: 2959 - DNA, 60 bp, Artificial Sequence
  Description of Artificial Sequence: targeting sequence/synthetic sequence
acagaggcaggtgagagcagtcacgaggaggacacggatggccacgtggctgcggggtcg

SEQ ID NO: 2960 - DNA, 60 bp, Artificial Sequence
  Description of Artificial Sequence: targeting sequence/synthetic sequence
acccaggacccctccacccaggcctccactgcgtcctccccagccccagaggagaatgct

SEQ ID NO: 2961 - DNA, 60 bp, Artificial Sequence
  Description of Artificial Sequence: targeting sequence/synthetic sequence
gacggcggagagaagaacatggaggacagcggccacgagaccggcatcgacagccagagc

SEQ ID NO: 2962 - DNA, 60 bp, Artificial Sequence
  Description of Artificial Sequence: targeting sequence/synthetic sequence
gaggggccacagccggcggaggggccacaaaccgctgagggaccacagcccccagagagg

SEQ ID NO: 2963 - DNA, 60 bp, Artificial Sequence
  Description of Artificial Sequence: targeting sequence/synthetic sequence
cctgcccctcttaatgctgattctgaggaagatgaagaacacacaattatcacagatacg

SEQ ID NO: 2964 - DNA, 60 bp, Artificial Sequence
  Description of Artificial Sequence: targeting sequence/synthetic sequence
gagcccactaaggagcccattgttgatgaagatgatgatgtggctgaagaaagacaaaga

SEQ ID NO: 2965 - DNA, 60 bp, Artificial Sequence
  Description of Artificial Sequence: targeting sequence/synthetic sequence
cctcttaatgctgattctgaggaagatgaagaacacacaattatcacagatacggagttg

SEQ ID NO: 2966 - DNA, 60 bp, Artificial Sequence
  Description of Artificial Sequence: targeting sequence/synthetic sequence
gagaatgtgattcgggacgcagtcacctacaccgagcacgccaagcgcaagaccgtcaca

SEQ ID NO: 2967 - DNA, 60 bp, Artificial Sequence
  Description of Artificial Sequence: targeting sequence/synthetic sequence
cagcaatctgcagagttcgtgaatgatctaaagcgggccaacagcaacctggtggctgcc

SEQ ID NO: 2968 - DNA, 60 bp, Artificial Sequence
  Description of Artificial Sequence: targeting sequence/synthetic sequence
ttcgtgcagaacgccctgaacggcaacggcgaccccaacaatatggacaaggccatcaag

SEQ ID NO: 2969 - DNA, 60 bp, Artificial Sequence
  Description of Artificial Sequence: targeting sequence/synthetic sequence
cagtcttccaagtccgctaataccatcaccagctttgtggacaggggactggacgatctg

SEQ ID NO: 2970 - DNA, 60 bp, Artificial Sequence
  Description of Artificial Sequence: targeting sequence/synthetic sequence
aagcagctgatcaacctgaaggagatcaacgccaacgtggtcagctcccccggcctgctc

SEQ ID NO: 2971 - DNA, 60 bp, Artificial Sequence
  Description of Artificial Sequence: targeting sequence/synthetic sequence
aagatcaccaacctgatgaccggccagaccgccaacgccaccagcctgctcggcaccatg

SEQ ID NO: 2972 - DNA, 60 bp, Artificial Sequence
  Description of Artificial Sequence: targeting sequence/synthetic sequence
atccgacatcagcaatctgcagagttcgtgaatgatctaaagcgggccaacagcaacctg

SEQ ID NO: 2973 - DNA, 60 bp, Artificial Sequence
  Description of Artificial Sequence: targeting sequence/synthetic sequence
tcagaacgagaggcgcaatttgtcttaaggaatgaaatacaaagagactctgcattgacc

SEQ ID NO: 2974 - DNA, 60 bp, Artificial Sequence
  Description of Artificial Sequence: targeting sequence/synthetic sequence
aaccagactcaagacccttctagaaatgagctacaggtccctaggagcttcgtggaccgc

SEQ ID NO: 2975 - DNA, 60 bp, Artificial Sequence
  Description of Artificial Sequence: targeting sequence/synthetic sequence
ttgaatacaattcttcctgacgccagagaccctgcctttaaagctgccaacggctccctg

SEQ ID NO: 2976 - DNA, 60 bp, Artificial Sequence
  Description of Artificial Sequence: targeting sequence/synthetic sequence
atgctggagagcatgatcgacaacaccgtgcgggagaccgtgggcgccgctaccagccgg

SEQ ID NO: 2977 - DNA, 60 bp, Artificial Sequence
  Description of Artificial Sequence: targeting sequence/synthetic sequence
gaactggatgtaaataatataaatatggacactgacacaagtcagttaggtttccatcag

SEQ ID NO: 2978 - DNA, 60 bp, Artificial Sequence
  Description of Artificial Sequence: targeting sequence/synthetic sequence
gccctgcaccagagcatgctgaacagccaggccatcgacaacctgcgggccagcctggag

SEQ ID NO: 2979 - DNA, 60 bp, Artificial Sequence
  Description of Artificial Sequence: targeting sequence/synthetic sequence
actcaagacccttctagaaatgagctacaggtccctaggagcttcgtggaccgcgttgtg

SEQ ID NO: 2980 - DNA, 60 bp, Artificial Sequence
  Description of Artificial Sequence: targeting sequence/synthetic sequence
cagttgaatacaattcttcctgacgccagagaccctgcctttaaagctgccaacggctcc

SEQ ID NO: 2981 - DNA, 60 bp, Artificial Sequence
  Description of Artificial Sequence: targeting sequence/synthetic sequence
aacgtgctgaacggcctggccggcaacgacgtgctgagcggcggagccggcgacgatgtg

SEQ ID NO: 2982 - DNA, 60 bp, Artificial Sequence
  Description of Artificial Sequence: targeting sequence/synthetic sequence
gaggtgcataatgccaagacaaagccacgggaggagcagttcaacagcacgttccgtgtg

SEQ ID NO: 2983 - DNA, 60 bp, Artificial Sequence
  Description of Artificial Sequence: targeting sequence/synthetic sequence
cggttcgtgcagaacgccctgaacggcaacggcgaccccaacaatatggacaaggccatc

SEQ ID NO: 2984 - DNA, 60 bp, Artificial Sequence
  Description of Artificial Sequence: targeting sequence/synthetic sequence
cacctgaaccccgccatcgagagcgacaacaatttcaccgacaccacaaagatcttccac

SEQ ID NO: 2985 - DNA, 60 bp, Artificial Sequence
  Description of Artificial Sequence: targeting sequence/synthetic sequence
aacgccctgaacggcaacggcgacagcaacaatatggaccgggccgtgaagctgtaccgg

SEQ ID NO: 2986 - DNA, 60 bp, Artificial Sequence
  Description of Artificial Sequence: targeting sequence/synthetic sequence
cgggtagatcctactgttgaaaatgaggaaacattcatgaacagagttgaagttaaagta

SEQ ID NO: 2987 - DNA, 60 bp, Artificial Sequence
  Description of Artificial Sequence: targeting sequence/synthetic sequence
ctgtctgctgagctccggaaccagctggacgtggccaaggtctcccagcagctgggcctg

SEQ ID NO: 2988 - DNA, 60 bp, Artificial Sequence
  Description of Artificial Sequence: targeting sequence/synthetic sequence
gcctctgggagtggtggccacaacaccatgccctccgggggtaactctgtgtccagcggc

SEQ ID NO: 2989 - DNA, 60 bp, Artificial Sequence
  Description of Artificial Sequence: targeting sequence/synthetic sequence
ttgctggccgacgtgaagggcgcgcgggccgccctcaacgagatcgagagccgccaccgc

SEQ ID NO: 2990 - DNA, 60 bp, Artificial Sequence
  Description of Artificial Sequence: targeting sequence/synthetic sequence
aagtccgctaataccatcaccagctttgtggacaggggactggacgatctgtcccacact

SEQ ID NO: 2991 - DNA, 60 bp, Artificial Sequence
  Description of Artificial Sequence: targeting sequence/synthetic sequence
atcggccccgccctgaacgtgggcaacgagaccgccaaggagaacttcaagaacgccttc

SEQ ID NO: 2992 - DNA, 60 bp, Artificial Sequence
  Description of Artificial Sequence: targeting sequence/synthetic sequence
agtggacagcagattgttggccctcccaggaagaaaagtcccaacgagctggtggatgat

SEQ ID NO: 2993 - DNA, 60 bp, Artificial Sequence
  Description of Artificial Sequence: targeting sequence/synthetic sequence
aactccaagaacacgttgtctctgcaaatgaacagcctgagagttgaggacacggctgtt

SEQ ID NO: 2994 - DNA, 60 bp, Artificial Sequence
  Description of Artificial Sequence: targeting sequence/synthetic sequence
gccgctgagctgcagaacgacgtgcggcaggccgtggagggcgccatcggccgggtggcc

SEQ ID NO: 2995 - DNA, 60 bp, Artificial Sequence
  Description of Artificial Sequence: targeting sequence/synthetic sequence
atcgtgaacgccaacaccgtgctggacgatctgaacagccggatgccccagagccggcac

SEQ ID NO: 2996 - DNA, 60 bp, Artificial Sequence
  Description of Artificial Sequence: targeting sequence/synthetic sequence
tcacagcctctcttcaatgatattgctgcaggcatcccctccatcacagcatacagtaag

SEQ ID NO: 2997 - DNA, 60 bp, Artificial Sequence
  Description of Artificial Sequence: targeting sequence/synthetic sequence
gcccccgagaagaccaagccccctctgcccagcgtgcagaagctggtggaggaccggtgg

SEQ ID NO: 2998 - DNA, 60 bp, Artificial Sequence
  Description of Artificial Sequence: targeting sequence/synthetic sequence
accaaggcgcctgtggacctgctcggtgttgcccacaacaacctcatggcaatggcccag

SEQ ID NO: 2999 - DNA, 60 bp, Artificial Sequence
  Description of Artificial Sequence: targeting sequence/synthetic sequence
ggccacggcaagaaggtggccgacgcgctgaccaacgccgtggcgcacgtggacgacatg

SEQ ID NO: 3000 - DNA, 60 bp, Artificial Sequence
  Description of Artificial Sequence: targeting sequence/synthetic sequence
aaccagcacctgaaccccgccatcgagagcgacaacaatttcaccgacaccacaaagatc

SEQ ID NO: 3001 - DNA, 60 bp, Artificial Sequence
  Description of Artificial Sequence: targeting sequence/synthetic sequence
cggttcgtgcagaacgccctgaacggcaacggcgaccccaacaatatggaccgggccgtg

SEQ ID NO: 3002 - DNA, 60 bp, Artificial Sequence
  Description of Artificial Sequence: targeting sequence/synthetic sequence
caccgaggccggaccttggaaatacctggcaactctgatcccaatatgatccctgatggg

SEQ ID NO: 3003 - DNA, 60 bp, Artificial Sequence
  Description of Artificial Sequence: targeting sequence/synthetic sequence
tcctccatcgagaaaaccatctccaaagccaaagggcagccccgagagccacaggtgtac

SEQ ID NO: 3004 - DNA, 60 bp, Artificial Sequence
  Description of Artificial Sequence: targeting sequence/synthetic sequence
ctcaaaggcctcaagttcaacctcacggagacttctgaggcagaaattcaccagagcttc

SEQ ID NO: 3005 - DNA, 60 bp, Artificial Sequence
  Description of Artificial Sequence: targeting sequence/synthetic sequence
tccttgtcgggtagccggaatggggaggagaacatcatcgataacccttatctgcggccg

SEQ ID NO: 3006 - DNA, 60 bp, Artificial Sequence
  Description of Artificial Sequence: targeting sequence/synthetic sequence
accaattcaaataaccatttggctgctgattcgcaggcttatgatcagaagaacattagg

SEQ ID NO: 3007 - DNA, 60 bp, Artificial Sequence
  Description of Artificial Sequence: targeting sequence/synthetic sequence
aaagaggccacagaggcagccaagtgtaacctgctggcagaaaagcaatatggcttttgt

SEQ ID NO: 3008 - DNA, 60 bp, Artificial Sequence
  Description of Artificial Sequence: targeting sequence/synthetic sequence
gagaaccagatcaccgcattcctgggccacaatggagctgggaaaaccaccaccttgtcc

SEQ ID NO: 3009 - DNA, 60 bp, Artificial Sequence
  Description of Artificial Sequence: targeting sequence/synthetic sequence
attgttggccctcccaggaagaaaagtcccaacgagctggtggatgatctctttaaaggt

SEQ ID NO: 3010 - DNA, 60 bp, Artificial Sequence
  Description of Artificial Sequence: targeting sequence/synthetic sequence
gtggcgcacgtggacgacatgcccaacgcgctgtccgccctgagcgacctgcacgcgcac

SEQ ID NO: 3011 - DNA, 60 bp, Artificial Sequence
  Description of Artificial Sequence: targeting sequence/synthetic sequence
ttcaccaattcaaataaccatttggctgctgattcgcaggcttatgatcagaagaacatt

SEQ ID NO: 3012 - DNA, 60 bp, Artificial Sequence
  Description of Artificial Sequence: targeting sequence/synthetic sequence
ctgcatctgcagagcactgattatggtaacttcctggccaacgaggcatcacctctgacg

SEQ ID NO: 3013 - DNA, 60 bp, Artificial Sequence
  Description of Artificial Sequence: targeting sequence/synthetic sequence
cccctgacccccgtgaacaatctgcccgacacccggagctccggccccgcccacagcaag

SEQ ID NO: 3014 - DNA, 60 bp, Artificial Sequence
  Description of Artificial Sequence: targeting sequence/synthetic sequence
gatgattcgaagaactcagtgcatctccaaatgaacagcctcaaaaccgacgacacggcc

SEQ ID NO: 3015 - DNA, 60 bp, Artificial Sequence
  Description of Artificial Sequence: targeting sequence/synthetic sequence
gacctgttctttaatgagattaaggcccgctctggccaggacgataagaccgtgtatgag

SEQ ID NO: 3016 - DNA, 60 bp, Artificial Sequence
  Description of Artificial Sequence: targeting sequence/synthetic sequence
acccggaacgccctgacccccctgacccccgtgaacaatctgcccgacacccggagctcc

SEQ ID NO: 3017 - DNA, 60 bp, Artificial Sequence
  Description of Artificial Sequence: targeting sequence/synthetic sequence
atcgacgaggtgctgaacgaggtgctggtggtccccaacatcaaggagagccaccatacc

SEQ ID NO: 3018 - DNA, 60 bp, Artificial Sequence
  Description of Artificial Sequence: targeting sequence/synthetic sequence
atccaggcctacaacgagatcgagaacgtgctgaagagcaagcagatcgcccccgagtac

SEQ ID NO: 3019 - DNA, 60 bp, Artificial Sequence
  Description of Artificial Sequence: targeting sequence/synthetic sequence
gcgcacgtggacgacatgcccaacgcgctgtccgccctgagcgacctgcacgcgcacaag

SEQ ID NO: 3020 - DNA, 60 bp, Artificial Sequence
  Description of Artificial Sequence: targeting sequence/synthetic sequence
cagcccagcctgaagaccggcagcgaggaaatccggagcctgtacaacaccgtggccacc

SEQ ID NO: 3021 - DNA, 60 bp, Artificial Sequence
  Description of Artificial Sequence: targeting sequence/synthetic sequence
cggagattcgtgcagaacgccctgaacggcaacggcgaccccaacaatatggacaaggcc

SEQ ID NO: 3022 - DNA, 60 bp, Artificial Sequence
  Description of Artificial Sequence: targeting sequence/synthetic sequence
agctacacccagcaaaactacgtgagcgaggtggagcagcaaaacagcaagagcgtgctg

SEQ ID NO: 3023 - DNA, 60 bp, Artificial Sequence
  Description of Artificial Sequence: targeting sequence/synthetic sequence
atactcggctcaggccattatgctgctggattggacctcaatgacacctactctgggaag

SEQ ID NO: 3024 - DNA, 60 bp, Artificial Sequence
  Description of Artificial Sequence: targeting sequence/synthetic sequence
ttagctgtcaaggcatataattctgctgggacaggcccctctagtgcaacagtcaatgtg

SEQ ID NO: 3025 - DNA, 60 bp, Artificial Sequence
  Description of Artificial Sequence: targeting sequence/synthetic sequence
gagaacgtgatccgtgacgcggtgacttacacggagcacgccaagcgcaagaccgtcacg

SEQ ID NO: 3026 - DNA, 60 bp, Artificial Sequence
  Description of Artificial Sequence: targeting sequence/synthetic sequence
agcgtgagcttcaacctgctcgagcaggaccccagcggcgccaccacaaagagcgccatg

SEQ ID NO: 3027 - DNA, 60 bp, Artificial Sequence
  Description of Artificial Sequence: targeting sequence/synthetic sequence
aaatcagaacgagaggcgcaatttgtcttaaggaatgaaatacaaagagactctgcattg

SEQ ID NO: 3028 - DNA, 60 bp, Artificial Sequence
  Description of Artificial Sequence: targeting sequence/synthetic sequence
ctgaacgtcatcgagctcaacgtacaaaagacggtcgactacaccggccaggccaaggcg

SEQ ID NO: 3029 - DNA, 60 bp, Artificial Sequence
  Description of Artificial Sequence: targeting sequence/synthetic sequence
acagagcagattctggctaagataccttctgaaaataacaaactaacgtactcacatggc

SEQ ID NO: 3030 - DNA, 60 bp, Artificial Sequence
  Description of Artificial Sequence: targeting sequence/synthetic sequence
tcgtctacaaataacaaccagactcaagacccttctagaaatgagctacaggtccctagg

SEQ ID NO: 3031 - DNA, 60 bp, Artificial Sequence
  Description of Artificial Sequence: targeting sequence/synthetic sequence
ctgacccccctgacccccgccaacaatctgcccgacacccagagctccggccccgcccac

SEQ ID NO: 3032 - DNA, 60 bp, Artificial Sequence
  Description of Artificial Sequence: targeting sequence/synthetic sequence
acggtctcagacaatgagctccaggaaatgtccaatcagggaagtaagtacgtcaataag

SEQ ID NO: 3033 - DNA, 60 bp, Artificial Sequence
  Description of Artificial Sequence: targeting sequence/synthetic sequence
atggcctctgggagtggtggccacaacaccatgccctccgggggtaactctgtgtccagc

SEQ ID NO: 3034 - DNA, 60 bp, Artificial Sequence
  Description of Artificial Sequence: targeting sequence/synthetic sequence
ctgaaccccgccatcgagagcgacaacaatttcaccgacaccacaaagatcttccacgac

SEQ ID NO: 3035 - DNA, 60 bp, Artificial Sequence
  Description of Artificial Sequence: targeting sequence/synthetic sequence
gccatcgtgaaggccaacgccaacgccgctgccatcaacaatctggccagctccatccag

SEQ ID NO: 3036 - DNA, 60 bp, Artificial Sequence
  Description of Artificial Sequence: targeting sequence/synthetic sequence
ctggtggagaagcaggccgacaccctgaacgtcatcgagctcaacgtacaaaagacggtc

SEQ ID NO: 3037 - DNA, 60 bp, Artificial Sequence
  Description of Artificial Sequence: targeting sequence/synthetic sequence
gccgtggccatcgtgaaggccaacgccaacgccgctgccatcaacaatctggccagctcc

SEQ ID NO: 3038 - DNA, 60 bp, Artificial Sequence
  Description of Artificial Sequence: targeting sequence/synthetic sequence
ctgaacaatctgaagcagctgcccctgctcgagaaccaggtgagcaacctggagcagagc

SEQ ID NO: 3039 - DNA, 60 bp, Artificial Sequence
  Description of Artificial Sequence: targeting sequence/synthetic sequence
atgaacgccatccccgacctgaagatcgtgcccatcgaccccaccaagaacatcgtgggc

SEQ ID NO: 3040 - DNA, 60 bp, Artificial Sequence
  Description of Artificial Sequence: targeting sequence/synthetic sequence
cacatcgtgaaaacactgcgtaacaacaaatccaacatggtggagaccctggaacagtat

SEQ ID NO: 3041 - DNA, 60 bp, Artificial Sequence
  Description of Artificial Sequence: targeting sequence/synthetic sequence
atcatgaacgccatccccgacctgaagatcgtgcccatcgaccccaccaagaacatcgtg

SEQ ID NO: 3042 - DNA, 60 bp, Artificial Sequence
  Description of Artificial Sequence: targeting sequence/synthetic sequence
agcctggtgcaggcccagaccaacgcccgggccatcgccgctatgaagaacagcatccag

SEQ ID NO: 3043 - DNA, 60 bp, Artificial Sequence
  Description of Artificial Sequence: targeting sequence/synthetic sequence
aacccctccttgtcgggtagccggaatggggaggagaacatcatcgataacccttatctg

SEQ ID NO: 3044 - DNA, 60 bp, Artificial Sequence
  Description of Artificial Sequence: targeting sequence/synthetic sequence
gaaaatgtaatccgcgatgctgtcacctacacggaacacgccaaacgcaagacagtcaca

SEQ ID NO: 3045 - DNA, 60 bp, Artificial Sequence
  Description of Artificial Sequence: targeting sequence/synthetic sequence
gacagcctgaacgtgatccggagcgccatcggcacccccctgcagaccatcagctccggc

SEQ ID NO: 3046 - DNA, 60 bp, Artificial Sequence
  Description of Artificial Sequence: targeting sequence/synthetic sequence
gtgaaaacccacaccaacatctccgagagccaccccaatgccactttcagcgccgtgggt

SEQ ID NO: 3047 - DNA, 60 bp, Artificial Sequence
  Description of Artificial Sequence: targeting sequence/synthetic sequence
ctgctgccccatgccaatgaggtgagccagaagatcggggacaacctgcgagagcttcag

SEQ ID NO: 3048 - DNA, 60 bp, Artificial Sequence
  Description of Artificial Sequence: targeting sequence/synthetic sequence
gtgggcctgaacctggagggcaacggcatcgccaccgacgtgcccagcgccaccaagcgg

SEQ ID NO: 3049 - DNA, 60 bp, Artificial Sequence
  Description of Artificial Sequence: targeting sequence/synthetic sequence
ctgtacagcagcagccccagagtcctaagcaacaacagtgacgccaacttggagctcatc

SEQ ID NO: 3050 - DNA, 60 bp, Artificial Sequence
  Description of Artificial Sequence: targeting sequence/synthetic sequence
ttttccgagaacttgctggccgacgtgaagggcgcgcgggccgccctcaacgagatcgag

SEQ ID NO: 3051 - DNA, 60 bp, Artificial Sequence
  Description of Artificial Sequence: targeting sequence/synthetic sequence
ttcgtgcagaacgccctgaacggcaacggcgaccccaacaatatggaccgggccgtgaag

SEQ ID NO: 3052 - DNA, 60 bp, Artificial Sequence
  Description of Artificial Sequence: targeting sequence/synthetic sequence
tcaagtgaagctatgaatgatatattagcacaggttgccactaatactgagactagtaaa

SEQ ID NO: 3053 - DNA, 60 bp, Artificial Sequence
  Description of Artificial Sequence: targeting sequence/synthetic sequence
gccgctgtggccatcgtgaaggccaacgccaacgccgctgccatcaacaatctggccagc

SEQ ID NO: 3054 - DNA, 60 bp, Artificial Sequence
  Description of Artificial Sequence: targeting sequence/synthetic sequence
cggctgctgccccatgccaatgaggtgagccagaagatcggggacaacctgcgagagctt

SEQ ID NO: 3055 - DNA, 60 bp, Artificial Sequence
  Description of Artificial Sequence: targeting sequence/synthetic sequence
aacctgtactggacagacacaggtcgaaataccattgaggcgtccaggctggatggttcc

SEQ ID NO: 3056 - DNA, 60 bp, Artificial Sequence
  Description of Artificial Sequence: targeting sequence/synthetic sequence
tgtgcagtaggggacggaggcaatgacgtcagcatgattcaggaatctgactgcggcgtg

SEQ ID NO: 3057 - DNA, 60 bp, Artificial Sequence
  Description of Artificial Sequence: targeting sequence/synthetic sequence
ctggatggagacccgcactctgactacatcaatgccaactacattgacggataccatcga

SEQ ID NO: 3058 - DNA, 60 bp, Artificial Sequence
  Description of Artificial Sequence: targeting sequence/synthetic sequence
gtgtcagagttcaccaattcaaataaccatttggctgctgattcgcaggcttatgatcag

SEQ ID NO: 3059 - DNA, 60 bp, Artificial Sequence
  Description of Artificial Sequence: targeting sequence/synthetic sequence
aataatataaatatggacactgacacaagtcagttaggtttccatcagtcaaatcagtgg

SEQ ID NO: 3060 - DNA, 60 bp, Artificial Sequence
  Description of Artificial Sequence: targeting sequence/synthetic sequence
cggttcgtgcagaacgccctgaacggcaacggcgacagcaacaatatggaccgggccgtg

SEQ ID NO: 3061 - DNA, 60 bp, Artificial Sequence
  Description of Artificial Sequence: targeting sequence/synthetic sequence
aataacaaccagactcaagacccttctagaaatgagctacaggtccctaggagcttcgtg

SEQ ID NO: 3062 - DNA, 60 bp, Artificial Sequence
  Description of Artificial Sequence: targeting sequence/synthetic sequence
caggcctacaacgagatcgagaacgtgctgaagagcaagcagatcgcccccgagtacaag

SEQ ID NO: 3063 - DNA, 60 bp, Artificial Sequence
  Description of Artificial Sequence: targeting sequence/synthetic sequence
gccaccaatgccaatgccagggcaaagggaggcaccgggcagacaggaggcctgacacag

SEQ ID NO: 3064 - DNA, 60 bp, Artificial Sequence
  Description of Artificial Sequence: targeting sequence/synthetic sequence
ggcgcctctaagctccaagaattgcacctctccagcaatgggctggaaagcctctcgccc

SEQ ID NO: 3065 - DNA, 60 bp, Artificial Sequence
  Description of Artificial Sequence: targeting sequence/synthetic sequence
aacagcacacagatgaacatgatcagagataccctggggaacccaacagtaaaagacttt

SEQ ID NO: 3066 - DNA, 60 bp, Artificial Sequence
  Description of Artificial Sequence: targeting sequence/synthetic sequence
gtgctggtggagaagcaggccgacaccctgaacgtcatcgagctcaacgtacaaaagacg

SEQ ID NO: 3067 - DNA, 60 bp, Artificial Sequence
  Description of Artificial Sequence: targeting sequence/synthetic sequence
catcagcaatctgcagagttcgtgaatgatctaaagcgggccaacagcaacctggtggct

SEQ ID NO: 3068 - DNA, 60 bp, Artificial Sequence
  Description of Artificial Sequence: targeting sequence/synthetic sequence
gggctgtctgctgagctccggaaccagctggacgtggccaaggtctcccagcagctgggc

SEQ ID NO: 3069 - DNA, 60 bp, Artificial Sequence
  Description of Artificial Sequence: targeting sequence/synthetic sequence
tctgcaaatgccattgagacgaaaggtttcaataaaaaggatctggagttagctctttct

SEQ ID NO: 3070 - DNA, 60 bp, Artificial Sequence
  Description of Artificial Sequence: targeting sequence/synthetic sequence
ggcaacgaggtgctgacccacaagacctgggacggcaactaccaggacaagaccgcccac

SEQ ID NO: 3071 - DNA, 60 bp, Artificial Sequence
  Description of Artificial Sequence: targeting sequence/synthetic sequence
gagattctcaaaggcctcaagttcaacctcacggagacttctgaggcagaaattcaccag

SEQ ID NO: 3072 - DNA, 60 bp, Artificial Sequence
  Description of Artificial Sequence: targeting sequence/synthetic sequence
tctgggctgtctgctgagctccggaaccagctggacgtggccaaggtctcccagcagctg

SEQ ID NO: 3073 - DNA, 60 bp, Artificial Sequence
  Description of Artificial Sequence: targeting sequence/synthetic sequence
acaaataacaaccagactcaagacccttctagaaatgagctacaggtccctaggagcttc

SEQ ID NO: 3074 - DNA, 60 bp, Artificial Sequence
  Description of Artificial Sequence: targeting sequence/synthetic sequence
gagagcatcgtgaacgccaacaccgtgctggacgatctgaacagccggatgccccagagc

SEQ ID NO: 3075 - DNA, 60 bp, Artificial Sequence
  Description of Artificial Sequence: targeting sequence/synthetic sequence
tccctcaacaaccagattgagagcatccgcagccccgagggctcccgcaagaaccctgct

SEQ ID NO: 3076 - DNA, 60 bp, Artificial Sequence
  Description of Artificial Sequence: targeting sequence/synthetic sequence
agcacaatggcaaagtcagagaacttggtgaagagccatgtccagctgcaaaattattca

SEQ ID NO: 3077 - DNA, 60 bp, Artificial Sequence
  Description of Artificial Sequence: targeting sequence/synthetic sequence
agcagccccagagtcctaagcaacaacagtgacgccaacttggagctcatcaacacctgg

SEQ ID NO: 3078 - DNA, 60 bp, Artificial Sequence
  Description of Artificial Sequence: targeting sequence/synthetic sequence
ctgaccaacaagtacgacatcaagcagatcgagaacgagctgaaccagaaggtgagcatc

SEQ ID NO: 3079 - DNA, 60 bp, Artificial Sequence
  Description of Artificial Sequence: targeting sequence/synthetic sequence
gagaacattaaaaggaaggtttcatcttcaaaaccagaagaaaataaaattcgtcaggaa

SEQ ID NO: 3080 - DNA, 60 bp, Artificial Sequence
  Description of Artificial Sequence: targeting sequence/synthetic sequence
aagagcttagtgaacaagggaatcctggtgcaaaccaggggtactggtgcttccggttcc

SEQ ID NO: 3081 - DNA, 60 bp, Artificial Sequence
  Description of Artificial Sequence: targeting sequence/synthetic sequence
tttgacaacagcacacagatgaacatgatcagagataccctggggaacccaacagtaaaa

SEQ ID NO: 3082 - DNA, 60 bp, Artificial Sequence
  Description of Artificial Sequence: targeting sequence/synthetic sequence
ctgaaccagcacctgaaccccgccatcgagagcgacaacaatttcaccgacaccacaaag

SEQ ID NO: 3083 - DNA, 60 bp, Artificial Sequence
  Description of Artificial Sequence: targeting sequence/synthetic sequence
cacccccggctggacccagaggagatccagatggcagattatatttccaagaacgtgcca

SEQ ID NO: 3084 - DNA, 60 bp, Artificial Sequence
  Description of Artificial Sequence: targeting sequence/synthetic sequence
accgccgtgagcaaggtgctgcacctggagggcgaggtgaacaagatcaagagcgccctg

SEQ ID NO: 3085 - DNA, 60 bp, Artificial Sequence
  Description of Artificial Sequence: targeting sequence/synthetic sequence
ctgaagcagctgcccctgctcgagaaccaggtgagcaacctggagcagagcgccgctagc

SEQ ID NO: 3086 - DNA, 60 bp, Artificial Sequence
  Description of Artificial Sequence: targeting sequence/synthetic sequence
gtgcagaacgccctgaacggcaacggcgaccccaacaatatggaccgggccgtgaagctg

SEQ ID NO: 3087 - DNA, 60 bp, Artificial Sequence
  Description of Artificial Sequence: targeting sequence/synthetic sequence
ctggctgctgccatgcccaggtcagcacccaatgacattctggacctccgcctccccccg

SEQ ID NO: 3088 - DNA, 60 bp, Artificial Sequence
  Description of Artificial Sequence: targeting sequence/synthetic sequence
taccagggcgacgtgcagaacgccgtggagggcgccatggtgcgggtggccgacaccgtg

SEQ ID NO: 3089 - DNA, 60 bp, Artificial Sequence
  Description of Artificial Sequence: targeting sequence/synthetic sequence
aaagtgaccggggtgcctggcacggagtttgtgcagaagctgaacgacaaagcggccaaa

SEQ ID NO: 3090 - DNA, 60 bp, Artificial Sequence
  Description of Artificial Sequence: targeting sequence/synthetic sequence
ttaaaaacccaacgaaatacatcaataaatatgcaactgccttcaagagagacaaacccc

SEQ ID NO: 3091 - DNA, 60 bp, Artificial Sequence
  Description of Artificial Sequence: targeting sequence/synthetic sequence
ttctaccagaacgacgtgcagaacgccgtggagcggagcatcgtgcgggtggccgacacc

SEQ ID NO: 3092 - DNA, 60 bp, Artificial Sequence
  Description of Artificial Sequence: targeting sequence/synthetic sequence
gtgaccaagctgaagcagctggagatgctggagaaccagatcagcaccatccaccagagc

SEQ ID NO: 3093 - DNA, 60 bp, Artificial Sequence
  Description of Artificial Sequence: targeting sequence/synthetic sequence
cgacatcagcaatctgcagagttcgtgaatgatctaaagcgggccaacagcaacctggtg

SEQ ID NO: 3094 - DNA, 60 bp, Artificial Sequence
  Description of Artificial Sequence: targeting sequence/synthetic sequence
ttcaatgatattgctgcaggcatcccctccatcacagcatacagtaagaatggcttgaag

SEQ ID NO: 3095 - DNA, 60 bp, Artificial Sequence
  Description of Artificial Sequence: targeting sequence/synthetic sequence
cagcccagcctgaagaccggcagcgaggaactgaccagcctgtacaacaccgtggccacc

SEQ ID NO: 3096 - DNA, 60 bp, Artificial Sequence
  Description of Artificial Sequence: targeting sequence/synthetic sequence
agcaacgtgctgcggaacatcgagaacgccgtgggcagcgcccgggacgatgtgctgatc

SEQ ID NO: 3097 - DNA, 60 bp, Artificial Sequence
  Description of Artificial Sequence: targeting sequence/synthetic sequence
agcgtgctgagcggcaagaaaaccgacgagctggagaaggtgcggctgcggcccggcgga

SEQ ID NO: 3098 - DNA, 60 bp, Artificial Sequence
  Description of Artificial Sequence: targeting sequence/synthetic sequence
cacaacgccatcttacgggccagcctgcctaaggacaggagccccgaggagtatggaatc

SEQ ID NO: 3099 - DNA, 60 bp, Artificial Sequence
  Description of Artificial Sequence: targeting sequence/synthetic sequence
aaaagtaatgggaaggagacagtggtagggagactcaacgagactcacatcttcaacgga

SEQ ID NO: 3100 - DNA, 60 bp, Artificial Sequence
  Description of Artificial Sequence: targeting sequence/synthetic sequence
tccaatgatgtgaccctggccaaccacatggaggcaggaggtcgggctggccgcatccac

SEQ ID NO: 3101 - DNA, 60 bp, Artificial Sequence
  Description of Artificial Sequence: targeting sequence/synthetic sequence
gaggtgcataatgccaagacaaagccgcgggaggagcagttcaacagcacgttccgtgtg

SEQ ID NO: 3102 - DNA, 60 bp, Artificial Sequence
  Description of Artificial Sequence: targeting sequence/synthetic sequence
agtagtaaattccagttttccagcaacaaggaacagaacggagtacaagatcctcagcat

SEQ ID NO: 3103 - DNA, 60 bp, Artificial Sequence
  Description of Artificial Sequence: targeting sequence/synthetic sequence
gccaatgaggtgagccagaagatcggggacaacctgcgagagcttcagcagcgcctggag

SEQ ID NO: 3104 - DNA, 60 bp, Artificial Sequence
  Description of Artificial Sequence: targeting sequence/synthetic sequence
ctgcggcagctggacatgctggacctctccaataactcactggccagcgtgcccgagggg

SEQ ID NO: 3105 - DNA, 60 bp, Artificial Sequence
  Description of Artificial Sequence: targeting sequence/synthetic sequence
taccgggagcgccattcggaagtggttggcggccatcacacctccattaacgacctgctg

SEQ ID NO: 3106 - DNA, 60 bp, Artificial Sequence
  Description of Artificial Sequence: targeting sequence/synthetic sequence
cacgccgcgaaagctgccctggccgccttcaacgctcagaacaacggctccaattttcag

SEQ ID NO: 3107 - DNA, 60 bp, Artificial Sequence
  Description of Artificial Sequence: targeting sequence/synthetic sequence
actcaggggaaagaacattcagaaatgtctaacaatgtgagtgatccgaagggtccacca

SEQ ID NO: 3108 - DNA, 60 bp, Artificial Sequence
  Description of Artificial Sequence: targeting sequence/synthetic sequence
ccacgaaaaagtaaccttgatgaagaggtgaatgtaattcctccacacactccagttagg

SEQ ID NO: 3109 - DNA, 60 bp, Artificial Sequence
  Description of Artificial Sequence: targeting sequence/synthetic sequence
gatggagacccgcactctgactacatcaatgccaactacattgacggataccatcgacct

SEQ ID NO: 3110 - DNA, 60 bp, Artificial Sequence
  Description of Artificial Sequence: targeting sequence/synthetic sequence
gaggtgctgaacgaggtgctggtggtccccaacatcaaggagagccaccataccacaagc

SEQ ID NO: 3111 - DNA, 60 bp, Artificial Sequence
  Description of Artificial Sequence: targeting sequence/synthetic sequence
gtgacccggaacgccctgacccccctgacccccgtgaacaatctgcccgacacccggagc

SEQ ID NO: 3112 - DNA, 60 bp, Artificial Sequence
  Description of Artificial Sequence: targeting sequence/synthetic sequence
gtgtggtccaatgatgtgaccctggccaaccacatggaggcaggaggtcgggctggccgc

SEQ ID NO: 3113 - DNA, 60 bp, Artificial Sequence
  Description of Artificial Sequence: targeting sequence/synthetic sequence
tccaacctgagtagtaaattccagttttccagcaacaaggaacagaacggagtacaagat

SEQ ID NO: 3114 - DNA, 60 bp, Artificial Sequence
  Description of Artificial Sequence: targeting sequence/synthetic sequence
ccctccttgtcgggtagccggaatggggaggagaacatcatcgataacccttatctgcgg

SEQ ID NO: 3115 - DNA, 60 bp, Artificial Sequence
  Description of Artificial Sequence: targeting sequence/synthetic sequence
atgcattcccagagcaccaatcagcttgatgtggggaacaatccccgtgtgggcaccaag

SEQ ID NO: 3116 - DNA, 60 bp, Artificial Sequence
  Description of Artificial Sequence: targeting sequence/synthetic sequence
acccggaacggcagcatgaaggccgctgacaacttcctggaccccaacaaggccagctcc

SEQ ID NO: 3117 - DNA, 60 bp, Artificial Sequence
  Description of Artificial Sequence: targeting sequence/synthetic sequence
ataaaggtttcaaataccttggaaagccgactggatctctcagccaagcaaaagatgcca

SEQ ID NO: 3118 - DNA, 60 bp, Artificial Sequence
  Description of Artificial Sequence: targeting sequence/synthetic sequence
ctacaaggaatccagttgaatacaattcttcctgacgccagagaccctgcctttaaagct

SEQ ID NO: 3119 - DNA, 60 bp, Artificial Sequence
  Description of Artificial Sequence: targeting sequence/synthetic sequence
gcccggccctactcggcgacggcggctgcggctactggaggcatggctaatgtaaaagca

SEQ ID NO: 3120 - DNA, 60 bp, Artificial Sequence
  Description of Artificial Sequence: targeting sequence/synthetic sequence
ctcacctgtgcagtaggggacggaggcaatgacgtcagcatgattcaggaatctgactgc

SEQ ID NO: 3121 - DNA, 60 bp, Artificial Sequence
  Description of Artificial Sequence: targeting sequence/synthetic sequence
gtgaacgccaacaccgtgctggacgatctgaacagccggatgccccagagccggcacgac

SEQ ID NO: 3122 - DNA, 60 bp, Artificial Sequence
  Description of Artificial Sequence: targeting sequence/synthetic sequence
ctgctgggaggtaacgagattcagagggatccaggttatcccagagatttaatgccacca

SEQ ID NO: 3123 - DNA, 60 bp, Artificial Sequence
  Description of Artificial Sequence: targeting sequence/synthetic sequence
aagatcatcatgaaggttgggcaagatcccaatgctgtgacgcctgagcagctgactacc

SEQ ID NO: 3124 - DNA, 60 bp, Artificial Sequence
  Description of Artificial Sequence: targeting sequence/synthetic sequence
cctggtctgctgggaggtaacgagattcagagggatccaggttatcccagagatttaatg

SEQ ID NO: 3125 - DNA, 60 bp, Artificial Sequence
  Description of Artificial Sequence: targeting sequence/synthetic sequence
cagcacctgaaccccgccatcgagagcgacaacaatttcaccgacaccacaaagatcttc

SEQ ID NO: 3126 - DNA, 60 bp, Artificial Sequence
  Description of Artificial Sequence: targeting sequence/synthetic sequence
cagcggagacggttcgtgcagaacgccctgaacggcaacggcgaccccaacaatatggac

SEQ ID NO: 3127 - DNA, 60 bp, Artificial Sequence
  Description of Artificial Sequence: targeting sequence/synthetic sequence
tctgggagtggtggccacaacaccatgccctccgggggtaactctgtgtccagcggctcc

SEQ ID NO: 3128 - DNA, 60 bp, Artificial Sequence
  Description of Artificial Sequence: targeting sequence/synthetic sequence
cagatcagcgacatcaacgacgagcggctgcagcaaggcgtgagcctgctccgggaccac

SEQ ID NO: 3129 - DNA, 60 bp, Artificial Sequence
  Description of Artificial Sequence: targeting sequence/synthetic sequence
tccagcaacaaggaacagaacggagtacaagatcctcagcatgagagaattattactgtg

SEQ ID NO: 3130 - DNA, 60 bp, Artificial Sequence
  Description of Artificial Sequence: targeting sequence/synthetic sequence
accatcgacaccgtgatcagcaacgccctgcagctgagccagcccaagccccagaagcag

SEQ ID NO: 3131 - DNA, 60 bp, Artificial Sequence
  Description of Artificial Sequence: targeting sequence/synthetic sequence
aatggtaaaagctacagtcttaaagcatccagcacaatggcaaagtcagagaacttggtg

SEQ ID NO: 3132 - DNA, 60 bp, Artificial Sequence
  Description of Artificial Sequence: targeting sequence/synthetic sequence
gtcagtattgtggctgaccagttagagaagaataggttgccttctgtgcatcctcatcat

SEQ ID NO: 3133 - DNA, 60 bp, Artificial Sequence
  Description of Artificial Sequence: targeting sequence/synthetic sequence
gccttctaccagaacgacgtgcagaacgccgtggagcggagcatcgtgcgggtggccgac

SEQ ID NO: 3134 - DNA, 60 bp, Artificial Sequence
  Description of Artificial Sequence: targeting sequence/synthetic sequence
atcccagaacagctcatttcaaacgaaatgccatttgatgcccttcccaagaagaaatcc

SEQ ID NO: 3135 - DNA, 60 bp, Artificial Sequence
  Description of Artificial Sequence: targeting sequence/synthetic sequence
aaaagtaaccttgatgaagaggtgaatgtaattcctccacacactccagttaggactgtt

SEQ ID NO: 3136 - DNA, 60 bp, Artificial Sequence
  Description of Artificial Sequence: targeting sequence/synthetic sequence
gagaacgtgatccgggacgccgtgacctacacggagcacgccaagcgcaagactgtcact

SEQ ID NO: 3137 - DNA, 60 bp, Artificial Sequence
  Description of Artificial Sequence: targeting sequence/synthetic sequence
ttcctgcctgatgaggggaaactacagcacctggaaaatgaactcacccacgatatcatc

SEQ ID NO: 3138 - DNA, 60 bp, Artificial Sequence
  Description of Artificial Sequence: targeting sequence/synthetic sequence
accagccagctgaagagcgtgggcctgaacctggagggcaacggcatcgccaccgacgtg

SEQ ID NO: 3139 - DNA, 60 bp, Artificial Sequence
  Description of Artificial Sequence: targeting sequence/synthetic sequence
gaaatccgacatcagcaatctgcagagttcgtgaatgatctaaagcgggccaacagcaac

SEQ ID NO: 3140 - DNA, 60 bp, Artificial Sequence
  Description of Artificial Sequence: targeting sequence/synthetic sequence
aaggccgtgaacaatagcctgaacgtgaacttcggcgccatcagcgagggcaagatgcag

SEQ ID NO: 3141 - DNA, 60 bp, Artificial Sequence
  Description of Artificial Sequence: targeting sequence/synthetic sequence
atctacaacagccggctgagcgaggtgaacatcgcccagaacaatgacatcatttacaac

SEQ ID NO: 3142 - DNA, 60 bp, Artificial Sequence
  Description of Artificial Sequence: targeting sequence/synthetic sequence
cccgagaagaccaagccccctctgcccagcgtgcagaagctggtggaggaccggtggaac

SEQ ID NO: 3143 - DNA, 60 bp, Artificial Sequence
  Description of Artificial Sequence: targeting sequence/synthetic sequence
aacaatgccattctccgggccaacctgcaaaagggagagaaccctagccattatggaatt

SEQ ID NO: 3144 - DNA, 60 bp, Artificial Sequence
  Description of Artificial Sequence: targeting sequence/synthetic sequence
ctgccagccaacctcctccagggcgcctctaagctccaagaattgcacctctccagcaat

SEQ ID NO: 3145 - DNA, 60 bp, Artificial Sequence
  Description of Artificial Sequence: targeting sequence/synthetic sequence
ttttatgatacttctgaggaaaactaccaagctcttgacgcagatttcaggaaattaaga

SEQ ID NO: 3146 - DNA, 60 bp, Artificial Sequence
  Description of Artificial Sequence: targeting sequence/synthetic sequence
aaggagaatgaactgcccacaactcccgtgaagaaggactcccccaagaacatcacattg

SEQ ID NO: 3147 - DNA, 60 bp, Artificial Sequence
  Description of Artificial Sequence: targeting sequence/synthetic sequence
cagctgcggagcgtgggcctgaacctggagggcaacggcgtggccaccgacgtgcccagc

SEQ ID NO: 3148 - DNA, 60 bp, Artificial Sequence
  Description of Artificial Sequence: targeting sequence/synthetic sequence
cagcccctgcggcccagccagctgaagcagcccaacggcgtgaacagccaggaggtgccc

SEQ ID NO: 3149 - DNA, 60 bp, Artificial Sequence
  Description of Artificial Sequence: targeting sequence/synthetic sequence
gcctctaagctccaagaattgcacctctccagcaatgggctggaaagcctctcgcccgaa

SEQ ID NO: 3150 - DNA, 60 bp, Artificial Sequence
  Description of Artificial Sequence: targeting sequence/synthetic sequence
accctgaacaccctggtgcaggacaacagctacgtgccccggtacgacagcaacggcacc

SEQ ID NO: 3151 - DNA, 60 bp, Artificial Sequence
  Description of Artificial Sequence: targeting sequence/synthetic sequence
acggctaaaaatctcttcctgaaccattcagaaaatgcaacagcgaaagacattgcccct

SEQ ID NO: 3152 - DNA, 60 bp, Artificial Sequence
  Description of Artificial Sequence: targeting sequence/synthetic sequence
tacctgctcggcagccggaaggtgagcggcggaggcgtgaccaaggagagcgccgagaag

SEQ ID NO: 3153 - DNA, 60 bp, Artificial Sequence
  Description of Artificial Sequence: targeting sequence/synthetic sequence
ctgagtagtaaattccagttttccagcaacaaggaacagaacggagtacaagatcctcag

SEQ ID NO: 3154 - DNA, 60 bp, Artificial Sequence
  Description of Artificial Sequence: targeting sequence/synthetic sequence
ggcgtgaccctgcacgacaacaatcggctgaccgaggaaaagaaagtgcccatcaacctg

SEQ ID NO: 3155 - DNA, 60 bp, Artificial Sequence
  Description of Artificial Sequence: targeting sequence/synthetic sequence
tacactgtcttgcaccgcctgggtcatcctgagcccaaccatgtgacggaggcctctgag

SEQ ID NO: 3156 - DNA, 60 bp, Artificial Sequence
  Description of Artificial Sequence: targeting sequence/synthetic sequence
cccgccctgcagaccggcacccaggagatcaagagcctgtacaacaccgtggccaccctg

SEQ ID NO: 3157 - DNA, 60 bp, Artificial Sequence
  Description of Artificial Sequence: targeting sequence/synthetic sequence
aagcgctacaacggcagcgacccagcctcgggcccctcggtgcaggacaagtatgtcaca

SEQ ID NO: 3158 - DNA, 60 bp, Artificial Sequence
  Description of Artificial Sequence: targeting sequence/synthetic sequence
aagagccaggtggagaacctgaagaacagcctggacgtgaagatcagcgaggccatgaac

SEQ ID NO: 3159 - DNA, 60 bp, Artificial Sequence
  Description of Artificial Sequence: targeting sequence/synthetic sequence
tttggcacaagggaccggacttgcaatgtcacctcccacggcatcgatggctgcgatctg

SEQ ID NO: 3160 - DNA, 60 bp, Artificial Sequence
  Description of Artificial Sequence: targeting sequence/synthetic sequence
tccaagaacacgttgtctctgcaaatgaacagcctgagagttgaggacacggctgtttac

SEQ ID NO: 3161 - DNA, 60 bp, Artificial Sequence
  Description of Artificial Sequence: targeting sequence/synthetic sequence
cggaacgccctgacccccctgacccccgtgaacaatctgcccgacacccggagctccggc

SEQ ID NO: 3162 - DNA, 60 bp, Artificial Sequence
  Description of Artificial Sequence: targeting sequence/synthetic sequence
gccgacgcgctgaccaacgccgtggcgcacgtggacgacatgcccaacgcgctgtccgcc

SEQ ID NO: 3163 - DNA, 60 bp, Artificial Sequence
  Description of Artificial Sequence: targeting sequence/synthetic sequence
gaattccgcacagttgcagccaacgtgattgggattggggagcccagccgcccctcagag

SEQ ID NO: 3164 - DNA, 60 bp, Artificial Sequence
  Description of Artificial Sequence: targeting sequence/synthetic sequence
ggcaacgacatccagatcctgcggagctccaccaacatcgccatcgagaagctgaacgac

SEQ ID NO: 3165 - DNA, 60 bp, Artificial Sequence
  Description of Artificial Sequence: targeting sequence/synthetic sequence
aatgtggcccacaacgccatcttacgggccagcctgcctaaggacaggagccccgaggag

SEQ ID NO: 3166 - DNA, 60 bp, Artificial Sequence
  Description of Artificial Sequence: targeting sequence/synthetic sequence
aaggtttcatcttcaaaaccagaagaaaataaaattcgtcaggaagatttaacaaaaatt

SEQ ID NO: 3167 - DNA, 60 bp, Artificial Sequence
  Description of Artificial Sequence: targeting sequence/synthetic sequence
atcggcaagaaaggccacgccagcgacctgaccagccccgacaagatccagaccatcatg

SEQ ID NO: 3168 - DNA, 60 bp, Artificial Sequence
  Description of Artificial Sequence: targeting sequence/synthetic sequence
tcagtggacggagaatccagcaattacatcaacgcagcactgatggatagccacaagcag

SEQ ID NO: 3169 - DNA, 60 bp, Artificial Sequence
  Description of Artificial Sequence: targeting sequence/synthetic sequence
ggcgagagcatcgtgaacgccaacaccgtgctggacgatctgaacagccggatgccccag

SEQ ID NO: 3170 - DNA, 60 bp, Artificial Sequence
  Description of Artificial Sequence: targeting sequence/synthetic sequence
tctgcagagttcgtgaatgatctaaagcgggccaacagcaacctggtggctgcctatgag

SEQ ID NO: 3171 - DNA, 60 bp, Artificial Sequence
  Description of Artificial Sequence: targeting sequence/synthetic sequence
gcagtcatgcattcccagagcaccaatcagcttgatgtggggaacaatccccgtgtgggc

SEQ ID NO: 3172 - DNA, 60 bp, Artificial Sequence
  Description of Artificial Sequence: targeting sequence/synthetic sequence
aagaactacctgctcaacaataagatccccagcaacaatgtggaggaagccggcagcaag

SEQ ID NO: 3173 - DNA, 60 bp, Artificial Sequence
  Description of Artificial Sequence: targeting sequence/synthetic sequence
agaagtggacagcagattgttggccctcccaggaagaaaagtcccaacgagctggtggat

SEQ ID NO: 3174 - DNA, 60 bp, Artificial Sequence
  Description of Artificial Sequence: targeting sequence/synthetic sequence
aacagcgcgctcgagaagcggttgcaggccctggagaccaagcagcaggaggagctggcc

SEQ ID NO: 3175 - DNA, 60 bp, Artificial Sequence
  Description of Artificial Sequence: targeting sequence/synthetic sequence
agcggcgtggccgtgagcaaggtgctgcacctggagggcgaggtgaacaagatcaagagc

SEQ ID NO: 3176 - DNA, 60 bp, Artificial Sequence
  Description of Artificial Sequence: targeting sequence/synthetic sequence
cccgccatcgagagcgacaacaatttcaccgacaccacaaagatcttccacgacagcctg

SEQ ID NO: 3177 - DNA, 60 bp, Artificial Sequence
  Description of Artificial Sequence: targeting sequence/synthetic sequence
ttttccagcaacaaggaacagaacggagtacaagatcctcagcatgagagaattattact

SEQ ID NO: 3178 - DNA, 60 bp, Artificial Sequence
  Description of Artificial Sequence: targeting sequence/synthetic sequence
tacatcgaggaaagcctgaacaagatcacccagaacagcggcaacgacgtgcggaacttc

SEQ ID NO: 3179 - DNA, 60 bp, Artificial Sequence
  Description of Artificial Sequence: targeting sequence/synthetic sequence
accacacagatcggcgagatcgtgaagaccgtggccaacaccgtggagagcgagatcaag

SEQ ID NO: 3180 - DNA, 60 bp, Artificial Sequence
  Description of Artificial Sequence: targeting sequence/synthetic sequence
cagctgcagcccgccctgcagaccggcacccaggagatcaagagcctgtacaacaccgtg

SEQ ID NO: 3181 - DNA, 60 bp, Artificial Sequence
  Description of Artificial Sequence: targeting sequence/synthetic sequence
gacttcaacaagaacaccgccctggacaagaactacctgctcaacaataagatccccagc

SEQ ID NO: 3182 - DNA, 60 bp, Artificial Sequence
  Description of Artificial Sequence: targeting sequence/synthetic sequence
cattcagctaacgttctgcaccgtgacctcaagccttccaacctgctgctcaacaccacc

SEQ ID NO: 3183 - DNA, 60 bp, Artificial Sequence
  Description of Artificial Sequence: targeting sequence/synthetic sequence
aaggtggccgacgcgctgaccaacgccgtggcgcacgtggacgacatgcccaacgcgctg

SEQ ID NO: 3184 - DNA, 60 bp, Artificial Sequence
  Description of Artificial Sequence: targeting sequence/synthetic sequence
atccagttgaatacaattcttcctgacgccagagaccctgcctttaaagctgccaacggc

SEQ ID NO: 3185 - DNA, 60 bp, Artificial Sequence
  Description of Artificial Sequence: targeting sequence/synthetic sequence
ggcgcccggggcagcgtgctgagcggcaagaaaaccgacgagctggagaaggtgcggctg

SEQ ID NO: 3186 - DNA, 60 bp, Artificial Sequence
  Description of Artificial Sequence: targeting sequence/synthetic sequence
agtaaccttgatgaagaggtgaatgtaattcctccacacactccagttaggactgttatg

SEQ ID NO: 3187 - DNA, 60 bp, Artificial Sequence
  Description of Artificial Sequence: targeting sequence/synthetic sequence
aagggcgccatcgagctgtacaacaataacacccacgacctggtgggcgacgtgaagctg

SEQ ID NO: 3188 - DNA, 60 bp, Artificial Sequence
  Description of Artificial Sequence: targeting sequence/synthetic sequence
ggccagatgctggagagcatgatcgacaacaccgtgcgggagaccgtgggcgccgctacc

SEQ ID NO: 3189 - DNA, 60 bp, Artificial Sequence
  Description of Artificial Sequence: targeting sequence/synthetic sequence
caggccgctaccacacagatcggcgagatcgtgaagaccgtggccaacaccgtggagagc

SEQ ID NO: 3190 - DNA, 60 bp, Artificial Sequence
  Description of Artificial Sequence: targeting sequence/synthetic sequence
caacttggattcatccacagagacatcaaaccagacaaccttcttttggacagcaagggc

SEQ ID NO: 3191 - DNA, 60 bp, Artificial Sequence
  Description of Artificial Sequence: targeting sequence/synthetic sequence
ctgacccccctgacccccgtgaacaatctgcccgacacccggagctccggccccgcccac

SEQ ID NO: 3192 - DNA, 60 bp, Artificial Sequence
  Description of Artificial Sequence: targeting sequence/synthetic sequence
tatgctcaggacacgcaggagaagctcaaccaccagcttgagggcctgaccttccagatg

SEQ ID NO: 3193 - DNA, 60 bp, Artificial Sequence
  Description of Artificial Sequence: targeting sequence/synthetic sequence
aattcaaataaccatttggctgctgattcgcaggcttatgatcagaagaacattaggcga

SEQ ID NO: 3194 - DNA, 60 bp, Artificial Sequence
  Description of Artificial Sequence: targeting sequence/synthetic sequence
cccgtcataggaagtgaggtcttcctgcccaacagcaaccacgtggccagtggcgccggg

SEQ ID NO: 3195 - DNA, 60 bp, Artificial Sequence
  Description of Artificial Sequence: targeting sequence/synthetic sequence
ctgctcatccagggctccaatgacgtggagatccgggcagagggcaatagcaggttcacg

SEQ ID NO: 3196 - DNA, 60 bp, Artificial Sequence
  Description of Artificial Sequence: targeting sequence/synthetic sequence
gggctttcatcacagcctctcttcaatgatattgctgcaggcatcccctccatcacagca

SEQ ID NO: 3197 - DNA, 60 bp, Artificial Sequence
  Description of Artificial Sequence: targeting sequence/synthetic sequence
catattaatgcatccaataactcagaaccatccagaatgaacatgacttctttagatgca

SEQ ID NO: 3198 - DNA, 60 bp, Artificial Sequence
  Description of Artificial Sequence: targeting sequence/synthetic sequence
tacagtcttaaagcatccagcacaatggcaaagtcagagaacttggtgaagagccatgtc

SEQ ID NO: 3199 - DNA, 60 bp, Artificial Sequence
  Description of Artificial Sequence: targeting sequence/synthetic sequence
aagattccacagctcactctgaatttttcagaggtcaaaactgagaaaaagaattcatca

SEQ ID NO: 3200 - DNA, 60 bp, Artificial Sequence
  Description of Artificial Sequence: targeting sequence/synthetic sequence
cgaggccggaccttggaaatacctggcaactctgatcccaatatgatccctgatggggac

SEQ ID NO: 3201 - DNA, 60 bp, Artificial Sequence
  Description of Artificial Sequence: targeting sequence/synthetic sequence
atccgggacattcaggatgaaaaccagctgctggtggccgacgtgaagcggctgggaaag

SEQ ID NO: 3202 - DNA, 60 bp, Artificial Sequence
  Description of Artificial Sequence: targeting sequence/synthetic sequence
gcccagaacgccctggccctgagcctgcccaagccccagagcaacctgcccgacaccaag

SEQ ID NO: 3203 - DNA, 60 bp, Artificial Sequence
  Description of Artificial Sequence: targeting sequence/synthetic sequence
aacaaccagattgagagcatccgcagccccgagggctcccgcaagaaccctgctcgcacc

SEQ ID NO: 3204 - DNA, 60 bp, Artificial Sequence
  Description of Artificial Sequence: targeting sequence/synthetic sequence
acgaaccttaaaatacgtcagggtttgagtcacactgctgacatgcaaacacgtgaagtt

SEQ ID NO: 3205 - DNA, 60 bp, Artificial Sequence
  Description of Artificial Sequence: targeting sequence/synthetic sequence
aaggccctgcacactgccaccttccaggctctgcagagggacctggagctgcaggcggcc

SEQ ID NO: 3206 - DNA, 60 bp, Artificial Sequence
  Description of Artificial Sequence: targeting sequence/synthetic sequence
ggggagacgaaccttaaaatacgtcagggtttgagtcacactgctgacatgcaaacacgt

SEQ ID NO: 3207 - DNA, 60 bp, Artificial Sequence
  Description of Artificial Sequence: targeting sequence/synthetic sequence
cggcagcgagtgctccggggagacgccgacaatgacatggtcaagattgagaacctgacc

SEQ ID NO: 3208 - DNA, 60 bp, Artificial Sequence
  Description of Artificial Sequence: targeting sequence/synthetic sequence
agctccctgagctacaaccggaacgaggtgctggccagcaacggcgacaagatcgagagc

SEQ ID NO: 3209 - DNA, 60 bp, Artificial Sequence
  Description of Artificial Sequence: targeting sequence/synthetic sequence
atcagcaacctgagcaacaccatcgagaagatcaacaccctgggcctggacagcaagaac

SEQ ID NO: 3210 - DNA, 60 bp, Artificial Sequence
  Description of Artificial Sequence: targeting sequence/synthetic sequence
cccagcaacatcgagaacctgcagctgaccaacagcctgaacgacgccctgcggaacaat

SEQ ID NO: 3211 - DNA, 60 bp, Artificial Sequence
  Description of Artificial Sequence: targeting sequence/synthetic sequence
agagatgattcgaagaactcagtgcatctccaaatgaacagcctcaaaaccgacgacacg

SEQ ID NO: 3212 - DNA, 60 bp, Artificial Sequence
  Description of Artificial Sequence: targeting sequence/synthetic sequence
acccccctgacccccgccaacaatctgcccgacacccagagctccggccccgcccacagc

SEQ ID NO: 3213 - DNA, 60 bp, Artificial Sequence
  Description of Artificial Sequence: targeting sequence/synthetic sequence
aagaaggagaatgaactgcccacaactcccgtgaagaaggactcccccaagaacatcaca

SEQ ID NO: 3214 - DNA, 60 bp, Artificial Sequence
  Description of Artificial Sequence: targeting sequence/synthetic sequence
cagaccagccagaacatcaagaaccagctggccgagctgaacgccaccaacatctacacc

SEQ ID NO: 3215 - DNA, 60 bp, Artificial Sequence
  Description of Artificial Sequence: targeting sequence/synthetic sequence
cagagcccccctctgcacgagcccgccaacatgaccacagaccccagctcctactatcac

SEQ ID NO: 3216 - DNA, 60 bp, Artificial Sequence
  Description of Artificial Sequence: targeting sequence/synthetic sequence
ctgcagcccagcctgaagaccggcagcgaggaaatccggagcctgtacaacaccgtggcc

SEQ ID NO: 3217 - DNA, 60 bp, Artificial Sequence
  Description of Artificial Sequence: targeting sequence/synthetic sequence
ttagagagacctggtggaaatgagattactcgaggaggctccacctcttatggaaccgga

SEQ ID NO: 3218 - DNA, 60 bp, Artificial Sequence
  Description of Artificial Sequence: targeting sequence/synthetic sequence
tacgtggacatcgccagcaacatcattggcgacctgagctccctgcccatcgccggcaag

SEQ ID NO: 3219 - DNA, 60 bp, Artificial Sequence
  Description of Artificial Sequence: targeting sequence/synthetic sequence
atgaatgatatattagcacaggttgccactaatactgagactagtaaaaatgtaggaaat

SEQ ID NO: 3220 - DNA, 60 bp, Artificial Sequence
  Description of Artificial Sequence: targeting sequence/synthetic sequence
ggctcaggccattatgctgctggattggacctcaatgacacctactctgggaagcgtgaa

SEQ ID NO: 3221 - DNA, 60 bp, Artificial Sequence
  Description of Artificial Sequence: targeting sequence/synthetic sequence
cttgatgaagaggtgaatgtaattcctccacacactccagttaggactgttatgaacact

SEQ ID NO: 3222 - DNA, 60 bp, Artificial Sequence
  Description of Artificial Sequence: targeting sequence/synthetic sequence
ccagccaacctcctccagggcgcctctaagctccaagaattgcacctctccagcaatggg

SEQ ID NO: 3223 - DNA, 60 bp, Artificial Sequence
  Description of Artificial Sequence: targeting sequence/synthetic sequence
ctggagaaccggttcaacgagatcgaccggaagctggacagccacagcgccgctctggag

SEQ ID NO: 3224 - DNA, 60 bp, Artificial Sequence
  Description of Artificial Sequence: targeting sequence/synthetic sequence
gcgaaagctgccctggccgccttcaacgctcagaacaacggctccaattttcagctggag

SEQ ID NO: 3225 - DNA, 60 bp, Artificial Sequence
  Description of Artificial Sequence: targeting sequence/synthetic sequence
cacactgccaccttccaggctctgcagagggacctggagctgcaggcggcctccagccgg

SEQ ID NO: 3226 - DNA, 60 bp, Artificial Sequence
  Description of Artificial Sequence: targeting sequence/synthetic sequence
cccgagggctacaacacggtcgtcggtgaacggggcactaccctgtctgggggccagaag

SEQ ID NO: 3227 - DNA, 60 bp, Artificial Sequence
  Description of Artificial Sequence: targeting sequence/synthetic sequence
ctgatggcctctgggagtggtggccacaacaccatgccctccgggggtaactctgtgtcc

SEQ ID NO: 3228 - DNA, 60 bp, Artificial Sequence
  Description of Artificial Sequence: targeting sequence/synthetic sequence
aaactgcatctgcagagcactgattatggtaacttcctggccaacgaggcatcacctctg

SEQ ID NO: 3229 - DNA, 60 bp, Artificial Sequence
  Description of Artificial Sequence: targeting sequence/synthetic sequence
aggagccccgtcataggaagtgaggtcttcctgcccaacagcaaccacgtggccagtggc

SEQ ID NO: 3230 - DNA, 60 bp, Artificial Sequence
  Description of Artificial Sequence: targeting sequence/synthetic sequence
atgaattctcttggacttgtaacatctaatggacttccagaggttgaaaatctttctaaa

SEQ ID NO: 3231 - DNA, 60 bp, Artificial Sequence
  Description of Artificial Sequence: targeting sequence/synthetic sequence
ccctatgctcaggacacgcaggagaagctcaaccaccagcttgagggcctgaccttccag

SEQ ID NO: 3232 - DNA, 60 bp, Artificial Sequence
  Description of Artificial Sequence: targeting sequence/synthetic sequence
agcggcatcgccgtgagcaaggtgctgcacctggagggcgaggtgaacaagatcaagagc

SEQ ID NO: 3233 - DNA, 60 bp, Artificial Sequence
  Description of Artificial Sequence: targeting sequence/synthetic sequence
cacaccttgaaccagattgatgaagtaaaggtgtggcctcagcagccctccggagagctg

SEQ ID NO: 3234 - DNA, 60 bp, Artificial Sequence
  Description of Artificial Sequence: targeting sequence/synthetic sequence
tgggacacagccaaggaggatgaaaaccgcaataagaatcgatatgggaacatcatatcc

SEQ ID NO: 3235 - DNA, 60 bp, Artificial Sequence
  Description of Artificial Sequence: targeting sequence/synthetic sequence
tccaagtccgctaataccatcaccagctttgtggacaggggactggacgatctgtcccac

SEQ ID NO: 3236 - DNA, 60 bp, Artificial Sequence
  Description of Artificial Sequence: targeting sequence/synthetic sequence
tacagtggcaatcagagaataaaggtttcaaataccttggaaagccgactggatctctca

SEQ ID NO: 3237 - DNA, 60 bp, Artificial Sequence
  Description of Artificial Sequence: targeting sequence/synthetic sequence
ctgaccacggctaaaaatctcttcctgaaccattcagaaaatgcaacagcgaaagacatt

SEQ ID NO: 3238 - DNA, 60 bp, Artificial Sequence
  Description of Artificial Sequence: targeting sequence/synthetic sequence
cagcccagcatccagaccggcagcgaggaaatcaagagcctgtacaacaccatcgccgtg

SEQ ID NO: 3239 - DNA, 60 bp, Artificial Sequence
  Description of Artificial Sequence: targeting sequence/synthetic sequence
cacgtggacgacatgcccaacgcgctgtccgccctgagcgacctgcacgcgcacaagctt

SEQ ID NO: 3240 - DNA, 60 bp, Artificial Sequence
  Description of Artificial Sequence: targeting sequence/synthetic sequence
gaacggctacatctagaaggcaacaaattgcaagtactgggaaaagatctcctcttgccg

SEQ ID NO: 3241 - DNA, 60 bp, Artificial Sequence
  Description of Artificial Sequence: targeting sequence/synthetic sequence
atacctggcaactctgatcccaatatgatccctgatggggactttaacagctacgtcagg

SEQ ID NO: 3242 - DNA, 60 bp, Artificial Sequence
  Description of Artificial Sequence: targeting sequence/synthetic sequence
gacatctgggggaacacagtgaatgtctctagtcgtatggactccacgggggttcccgac

SEQ ID NO: 3243 - DNA, 60 bp, Artificial Sequence
  Description of Artificial Sequence: targeting sequence/synthetic sequence
acccaaaagtctaaagcatcacaaggtagtgaccttgaacaaaatgaagcctcaagaaag

SEQ ID NO: 3244 - DNA, 60 bp, Artificial Sequence
  Description of Artificial Sequence: targeting sequence/synthetic sequence
gagctcaaggccaagatcgaccagaacgtggaggagctcaagggacgccttacgccctac

SEQ ID NO: 3245 - DNA, 60 bp, Artificial Sequence
  Description of Artificial Sequence: targeting sequence/synthetic sequence
catctgcagatctacccggatggcaaagtcaatggatcccacgaagccaatatgttaagt

SEQ ID NO: 3246 - DNA, 60 bp, Artificial Sequence
  Description of Artificial Sequence: targeting sequence/synthetic sequence
ctgaacaatctgaagcagctgcccctgctcgagaaccagatcagcaacctggagcagagc

SEQ ID NO: 3247 - DNA, 60 bp, Artificial Sequence
  Description of Artificial Sequence: targeting sequence/synthetic sequence
aagctgttcggccgggcccccgaggtgatcgcccgggccgacaacgacgtgaacagctcc

SEQ ID NO: 3248 - DNA, 60 bp, Artificial Sequence
  Description of Artificial Sequence: targeting sequence/synthetic sequence
aagcaggccgacaccctgaacgtcatcgagctcaacgtacaaaagacggtcgactacacc

SEQ ID NO: 3249 - DNA, 60 bp, Artificial Sequence
  Description of Artificial Sequence: targeting sequence/synthetic sequence
gcgctccagagcaaccactttgagctctctttacgtacagaagcaacgcagggattagtt

SEQ ID NO: 3250 - DNA, 60 bp, Artificial Sequence
  Description of Artificial Sequence: targeting sequence/synthetic sequence
aacgccctgaacggcaacggcgaccccaacaatatggacaaggccgtgaagctgtacggc

SEQ ID NO: 3251 - DNA, 60 bp, Artificial Sequence
  Description of Artificial Sequence: targeting sequence/synthetic sequence
cggaatggtgtgagtgaggagaacctggccaagctgatccagcatgccaatgtacaggcg

SEQ ID NO: 3252 - DNA, 60 bp, Artificial Sequence
  Description of Artificial Sequence: targeting sequence/synthetic sequence
gggcccctccaggacaacgagctgccggggctggatgagaggccgccgcgcgcccacgca

SEQ ID NO: 3253 - DNA, 60 bp, Artificial Sequence
  Description of Artificial Sequence: targeting sequence/synthetic sequence
ctgcagcccagcctgaagaccggcagcgaggaactgaccagcctgtacaacaccgtggcc

SEQ ID NO: 3254 - DNA, 60 bp, Artificial Sequence
  Description of Artificial Sequence: targeting sequence/synthetic sequence
cagaccagagctaatcccatgtacaatgccgtgtccaacgcagacctgatggatttcaag

SEQ ID NO: 3255 - DNA, 60 bp, Artificial Sequence
  Description of Artificial Sequence: targeting sequence/synthetic sequence
cagaccgtggccagcatcagctccggccccaagcacacccagaaggtgcccatcctgacc

SEQ ID NO: 3256 - DNA, 60 bp, Artificial Sequence
  Description of Artificial Sequence: targeting sequence/synthetic sequence
ggcatcagctccctgagctacaaccggaacgaggtgctggccagcaacggcgacaagatc

SEQ ID NO: 3257 - DNA, 60 bp, Artificial Sequence
  Description of Artificial Sequence: targeting sequence/synthetic sequence
ttctaccagggcgacgtgcagaacgccgtggagggcgccatggtgcgggtggccgacacc

SEQ ID NO: 3258 - DNA, 60 bp, Artificial Sequence
  Description of Artificial Sequence: targeting sequence/synthetic sequence
tcttcaatcccagaacagctcatttcaaacgaaatgccatttgatgcccttcccaagaag

SEQ ID NO: 3259 - DNA, 60 bp, Artificial Sequence
  Description of Artificial Sequence: targeting sequence/synthetic sequence
atcaatgacatttcacacacgcagtcagtctcctccaaacagaaagtcaccggtttggac

SEQ ID NO: 3260 - DNA, 60 bp, Artificial Sequence
  Description of Artificial Sequence: targeting sequence/synthetic sequence
aagagcatcaaccagaacaatgccgacatccaggtggtcaacgccatcagctccctgacc

SEQ ID NO: 3261 - DNA, 60 bp, Artificial Sequence
  Description of Artificial Sequence: targeting sequence/synthetic sequence
gtgtggagcaaccagctggacggcggagccggcgtggacaccgtgaagtacaacgtgcac

SEQ ID NO: 3262 - DNA, 60 bp, Artificial Sequence
  Description of Artificial Sequence: targeting sequence/synthetic sequence
tctacaaataacaaccagactcaagacccttctagaaatgagctacaggtccctaggagc

SEQ ID NO: 3263 - DNA, 60 bp, Artificial Sequence
  Description of Artificial Sequence: targeting sequence/synthetic sequence
agcgtgggcctgaacctggagggcaacggcgtggccaccgacgtgcccaccgccaccaag

SEQ ID NO: 3264 - DNA, 60 bp, Artificial Sequence
  Description of Artificial Sequence: targeting sequence/synthetic sequence
agcgtgctgaacgaggtgctggtggtccccaacatccagcccagcaccagcgtgagctcc

SEQ ID NO: 3265 - DNA, 60 bp, Artificial Sequence
  Description of Artificial Sequence: targeting sequence/synthetic sequence
ggcggagacgccgctgagcacaacaaggtggtcaccaaggacttcgacgtgatccggaac

SEQ ID NO: 3266 - DNA, 60 bp, Artificial Sequence
  Description of Artificial Sequence: targeting sequence/synthetic sequence
aacgtgagcatcaacaagaaaatcattcagcccggcgccgaggaccagatcaagggcctg

SEQ ID NO: 3267 - DNA, 60 bp, Artificial Sequence
  Description of Artificial Sequence: targeting sequence/synthetic sequence
gccggcatccccagcctggtgaacaatgagctggtgctgcgggacaaggccaccaaggtg

SEQ ID NO: 3268 - DNA, 60 bp, Artificial Sequence
  Description of Artificial Sequence: targeting sequence/synthetic sequence
gtgggcctgaacctggagggcaacggcgtggccaccgacgtgcccagcgccaccaagcgg

SEQ ID NO: 3269 - DNA, 60 bp, Artificial Sequence
  Description of Artificial Sequence: targeting sequence/synthetic sequence
agcggcaccgccgtgagcaaggtgctgcacctggagggcgaggtgaacaagatcaagagc

SEQ ID NO: 3270 - DNA, 60 bp, Artificial Sequence
  Description of Artificial Sequence: targeting sequence/synthetic sequence
ctgcagagcactgattatggtaacttcctggccaacgaggcatcacctctgacggtgtca

SEQ ID NO: 3271 - DNA, 60 bp, Artificial Sequence
  Description of Artificial Sequence: targeting sequence/synthetic sequence
agatcatcttctcgaaccccgagtgacaagcctgtagcccatgttgtagcaaaccctcaa

SEQ ID NO: 3272 - DNA, 60 bp, Artificial Sequence
  Description of Artificial Sequence: targeting sequence/synthetic sequence
gccgtgagcaaggtgctgcacctggagggcgaggtgaacaagatcaagaacgccctgctc

SEQ ID NO: 3273 - DNA, 60 bp, Artificial Sequence
  Description of Artificial Sequence: targeting sequence/synthetic sequence
gcccctgggttccgaggacctgctggaccaaatggcatcccaggagaaaagggtcctgct

SEQ ID NO: 3274 - DNA, 60 bp, Artificial Sequence
  Description of Artificial Sequence: targeting sequence/synthetic sequence
gtccagtcgaagattgggtccctggacaatatcacccacgtccctggcggaggaaataaa

SEQ ID NO: 3275 - DNA, 60 bp, Artificial Sequence
  Description of Artificial Sequence: targeting sequence/synthetic sequence
ccccggcagctggtgacgaactgcacccagcggctggagcagggtccctgcaaagacctt

SEQ ID NO: 3276 - DNA, 60 bp, Artificial Sequence
  Description of Artificial Sequence: targeting sequence/synthetic sequence
ggcgtggccgtgagcaaggtgctgcacctggagggcgaggtgaacaagatcaagagcgcc

SEQ ID NO: 3277 - DNA, 60 bp, Artificial Sequence
  Description of Artificial Sequence: targeting sequence/synthetic sequence
cagaacaatgccgacatccaggtggtcaacgccatcagctccctgacctaccccggcgcc

SEQ ID NO: 3278 - DNA, 60 bp, Artificial Sequence
  Description of Artificial Sequence: targeting sequence/synthetic sequence
gagaagaccaagcagaccctggccagcgtgagctccggccccaagcacacccagagcgtg

SEQ ID NO: 3279 - DNA, 60 bp, Artificial Sequence
  Description of Artificial Sequence: targeting sequence/synthetic sequence
tcctcttcaatcccagaacagctcatttcaaacgaaatgccatttgatgcccttcccaag

SEQ ID NO: 3280 - DNA, 60 bp, Artificial Sequence
  Description of Artificial Sequence: targeting sequence/synthetic sequence
ttcggccgggcccccgaggtgatcgcccgggccgacaacgacgtgaacagctccctggcc

SEQ ID NO: 3281 - DNA, 60 bp, Artificial Sequence
  Description of Artificial Sequence: targeting sequence/synthetic sequence
cttacagggacagccggcaaaataagcagcatcagccaaccaggaaatgattttagcaca

SEQ ID NO: 3282 - DNA, 60 bp, Artificial Sequence
  Description of Artificial Sequence: targeting sequence/synthetic sequence
ctgggcagccggaaggtgagcggcggaggcgtgaccaaggagagcgccgagaagggcttc

SEQ ID NO: 3283 - DNA, 60 bp, Artificial Sequence
  Description of Artificial Sequence: targeting sequence/synthetic sequence
aactacctgctcaacaataagatccccagcaacaatgtggaggaagccggcagcaagaac

SEQ ID NO: 3284 - DNA, 60 bp, Artificial Sequence
  Description of Artificial Sequence: targeting sequence/synthetic sequence
agagacaactccaagaacacgttgtctctgcaaatgaacagcctgagagttgaggacacg

SEQ ID NO: 3285 - DNA, 60 bp, Artificial Sequence
  Description of Artificial Sequence: targeting sequence/synthetic sequence
gagaagcaggccgacaccctgaacgtcatcgagctcaacgtacaaaagacggtcgactac

SEQ ID NO: 3286 - DNA, 60 bp, Artificial Sequence
  Description of Artificial Sequence: targeting sequence/synthetic sequence
caaatcaacaaaagtaatgggaaggagacagtggtagggagactcaacgagactcacatc

SEQ ID NO: 3287 - DNA, 60 bp, Artificial Sequence
  Description of Artificial Sequence: targeting sequence/synthetic sequence
cttggacttgtaacatctaatggacttccagaggttgaaaatctttctaaacgatacgaa

SEQ ID NO: 3288 - DNA, 60 bp, Artificial Sequence
  Description of Artificial Sequence: targeting sequence/synthetic sequence
gagaaccaggtggtctccttcttgggccacaacggggcgggcaagaccaccaccatgtcc

SEQ ID NO: 3289 - DNA, 60 bp, Artificial Sequence
  Description of Artificial Sequence: targeting sequence/synthetic sequence
accggcggagagagccgggacctgcccagcggccagggcatcaacaatctggacaacctg

SEQ ID NO: 3290 - DNA, 60 bp, Artificial Sequence
  Description of Artificial Sequence: targeting sequence/synthetic sequence
gccattctctcatctaccaacgtgggatccaatacatatggcaagaggaatgcagtagag

SEQ ID NO: 3291 - DNA, 60 bp, Artificial Sequence
  Description of Artificial Sequence: targeting sequence/synthetic sequence
agccagaccatcccccagatcagcaaccggaccctgaacaccctggtgcaggacaacagc

SEQ ID NO: 3292 - DNA, 60 bp, Artificial Sequence
  Description of Artificial Sequence: targeting sequence/synthetic sequence
gtcccccggcagctggtgacgaactgcacccagcggctggagcagggtccctgcaaagac

SEQ ID NO: 3293 - DNA, 60 bp, Artificial Sequence
  Description of Artificial Sequence: targeting sequence/synthetic sequence
gacaaggagggcaacgaggtgctgacccacaagacctgggacggcaactaccaggacaag

SEQ ID NO: 3294 - DNA, 60 bp, Artificial Sequence
  Description of Artificial Sequence: targeting sequence/synthetic sequence
cgggccaatgccctcctggccaatggcgtggagctgagagataaccagctggtggtgcca

SEQ ID NO: 3295 - DNA, 60 bp, Artificial Sequence
  Description of Artificial Sequence: targeting sequence/synthetic sequence
cttatctcagtggacggagaatccagcaattacatcaacgcagcactgatggatagccac

SEQ ID NO: 3296 - DNA, 60 bp, Artificial Sequence
  Description of Artificial Sequence: targeting sequence/synthetic sequence
cagatcgagaacgagctgaaccagaaggtgagcatcgccatgaacaatatcgaccggttc

SEQ ID NO: 3297 - DNA, 60 bp, Artificial Sequence
  Description of Artificial Sequence: targeting sequence/synthetic sequence
agcagtgaaatccgacatcagcaatctgcagagttcgtgaatgatctaaagcgggccaac

SEQ ID NO: 3298 - DNA, 60 bp, Artificial Sequence
  Description of Artificial Sequence: targeting sequence/synthetic sequence
atgcagcaaagccaccaggccggctacgccaacgccgctgaccgggagagcggcatcccc

SEQ ID NO: 3299 - DNA, 60 bp, Artificial Sequence
  Description of Artificial Sequence: targeting sequence/synthetic sequence
agcggcggagtgcagcaaagcgtgcaggacgccttccccaacaatgtgatcctgagctcc

SEQ ID NO: 3300 - DNA, 60 bp, Artificial Sequence
  Description of Artificial Sequence: targeting sequence/synthetic sequence
gaagctatgaatgatatattagcacaggttgccactaatactgagactagtaaaaatgta

SEQ ID NO: 3301 - DNA, 60 bp, Artificial Sequence
  Description of Artificial Sequence: targeting sequence/synthetic sequence
ctgcagagcccccctatccgggaggccgctaactacaccgagaacaccagctcctactat

SEQ ID NO: 3302 - DNA, 60 bp, Artificial Sequence
  Description of Artificial Sequence: targeting sequence/synthetic sequence
atcagcctgagcgacaacgacaccttcgccgctagcgagcacggcaagcggcagaactac

SEQ ID NO: 3303 - DNA, 60 bp, Artificial Sequence
  Description of Artificial Sequence: targeting sequence/synthetic sequence
atcaaggtgaagaacaatcggctgccctacgtggccgacaaggacagcatcagccaggag

SEQ ID NO: 3304 - DNA, 60 bp, Artificial Sequence
  Description of Artificial Sequence: targeting sequence/synthetic sequence
accagccagaacatcaagaaccagctggccgagctgaacgccaccaacatctacaccgtg

SEQ ID NO: 3305 - DNA, 60 bp, Artificial Sequence
  Description of Artificial Sequence: targeting sequence/synthetic sequence
ttcggcgagagcatcgtgaacgccaacaccgtgctggacgatctgaacagccggatgccc

SEQ ID NO: 3306 - DNA, 60 bp, Artificial Sequence
  Description of Artificial Sequence: targeting sequence/synthetic sequence
gtggaggtgcataatgccaagacaaagccacgggaggagcagttcaacagcacgttccgt

SEQ ID NO: 3307 - DNA, 60 bp, Artificial Sequence
  Description of Artificial Sequence: targeting sequence/synthetic sequence
ctgaccaagctgaagcagctggacatgctggagaaccagatcgccaccatccaccagagc

SEQ ID NO: 3308 - DNA, 60 bp, Artificial Sequence
  Description of Artificial Sequence: targeting sequence/synthetic sequence
cggggcatccaggcctacaacgagatcgagaacgtgctgaagagcaagcagatcgccccc

SEQ ID NO: 3309 - DNA, 60 bp, Artificial Sequence
  Description of Artificial Sequence: targeting sequence/synthetic sequence
agccagcccctgcggcccagccagctgaagcagcccaacggcgtgaacagccaggaggtg

SEQ ID NO: 3310 - DNA, 60 bp, Artificial Sequence
  Description of Artificial Sequence: targeting sequence/synthetic sequence
ttccgaggacctgctggaccaaatggcatcccaggagaaaagggtcctgctggagagcgt

SEQ ID NO: 3311 - DNA, 60 bp, Artificial Sequence
  Description of Artificial Sequence: targeting sequence/synthetic sequence
accgccgctgtggccatcgtgaaggccaacgccaacgccgctgccatcaacaatctggcc

SEQ ID NO: 3312 - DNA, 60 bp, Artificial Sequence
  Description of Artificial Sequence: targeting sequence/synthetic sequence
atcgagcagaccagcttctaccagggcgacgtgcagaacgccgtggagggcgccatggtg

SEQ ID NO: 3313 - DNA, 60 bp, Artificial Sequence
  Description of Artificial Sequence: targeting sequence/synthetic sequence
gtgggttatttggatcgcaacctggagaaaaacagcaccaagcaggagatcctggctgct

SEQ ID NO: 3314 - DNA, 60 bp, Artificial Sequence
  Description of Artificial Sequence: targeting sequence/synthetic sequence
tgggggaacacagtgaatgtctctagtcgtatggactccacgggggttcccgaccgcatc

SEQ ID NO: 3315 - DNA, 60 bp, Artificial Sequence
  Description of Artificial Sequence: targeting sequence/synthetic sequence
tggaaccaggtggaccaggtgatccggaacgccctggccagccccggcagcggcggagac

SEQ ID NO: 3316 - DNA, 60 bp, Artificial Sequence
  Description of Artificial Sequence: targeting sequence/synthetic sequence
tttggtgacaatagaaagaaccagcttaaagatatggctattgctactggtggtgcagtg

SEQ ID NO: 3317 - DNA, 60 bp, Artificial Sequence
  Description of Artificial Sequence: targeting sequence/synthetic sequence
acccacaccaacatctccgagagccaccccaatgccactttcagcgccgtgggtgaggcc

SEQ ID NO: 3318 - DNA, 60 bp, Artificial Sequence
  Description of Artificial Sequence: targeting sequence/synthetic sequence
gtccgatttgggtctgatgatgagggcagatacctaactcaggaaactaacaaggtggag

SEQ ID NO: 3319 - DNA, 60 bp, Artificial Sequence
  Description of Artificial Sequence: targeting sequence/synthetic sequence
gcgctgaccaacgccgtggcgcacgtggacgacatgcccaacgcgctgtccgccctgagc

SEQ ID NO: 3320 - DNA, 60 bp, Artificial Sequence
  Description of Artificial Sequence: targeting sequence/synthetic sequence
gacaacgacgtgaacagctccctggcccacggccacaccgccgtggacctgaccctgagc

SEQ ID NO: 3321 - DNA, 60 bp, Artificial Sequence
  Description of Artificial Sequence: targeting sequence/synthetic sequence
cccaacgccgtgaccctgcggagcgtgaacaatcagcccgtgatcgtggacagcctgacc

SEQ ID NO: 3322 - DNA, 60 bp, Artificial Sequence
  Description of Artificial Sequence: targeting sequence/synthetic sequence
cagaacgccctgaacggcaacggcgaccccaacaatatggacaaggccatcaagctgtac

SEQ ID NO: 3323 - DNA, 60 bp, Artificial Sequence
  Description of Artificial Sequence: targeting sequence/synthetic sequence
cagttcggcatctacaacgacaagctgagcgaggtgaacatcagccagaacgactacatc

SEQ ID NO: 3324 - DNA, 60 bp, Artificial Sequence
  Description of Artificial Sequence: targeting sequence/synthetic sequence
gtgagctggaacaccgtggaggacagcatcattcggaccggcttccagggcgagagcggc

SEQ ID NO: 3325 - DNA, 60 bp, Artificial Sequence
  Description of Artificial Sequence: targeting sequence/synthetic sequence
atgatcgacaacaccgtgcgggagaccgtgggcgccgctaccagccgggacgccctgccc

SEQ ID NO: 3326 - DNA, 60 bp, Artificial Sequence
  Description of Artificial Sequence: targeting sequence/synthetic sequence
cccgccctgcagaccggcaccaaggagctgatcagcctgcacaacaccgtggccaccctg

SEQ ID NO: 3327 - DNA, 60 bp, Artificial Sequence
  Description of Artificial Sequence: targeting sequence/synthetic sequence
aaggaggtgcacgctctgaagagactgagggactcggccaatgccaatgatgtggaaaca

SEQ ID NO: 3328 - DNA, 60 bp, Artificial Sequence
  Description of Artificial Sequence: targeting sequence/synthetic sequence
ctgcccaacaagagcggcaagaaaggcaacagcgccgacctgaccttccccgagaagatc

SEQ ID NO: 3329 - DNA, 60 bp, Artificial Sequence
  Description of Artificial Sequence: targeting sequence/synthetic sequence
cctctgagcgggaaggtgaggagtgaggggaccaattccacgctgaccctgagccctgtg

SEQ ID NO: 3330 - DNA, 60 bp, Artificial Sequence
  Description of Artificial Sequence: targeting sequence/synthetic sequence
atgtacggcggagtgaccctgcacgacaacaatcggctgaccgaggaaaagaaagtgccc

SEQ ID NO: 3331 - DNA, 60 bp, Artificial Sequence
  Description of Artificial Sequence: targeting sequence/synthetic sequence
cgagtgctccggggagacgccgacaatgacatggtcaagattgagaacctgaccaaggtc

SEQ ID NO: 3332 - DNA, 60 bp, Artificial Sequence
  Description of Artificial Sequence: targeting sequence/synthetic sequence
cagcagattgttggccctcccaggaagaaaagtcccaacgagctggtggatgatctcttt

SEQ ID NO: 3333 - DNA, 60 bp, Artificial Sequence
  Description of Artificial Sequence: targeting sequence/synthetic sequence
gttaagggccacggcaagaaggtggccgacgcgctgaccaacgccgtggcgcacgtggac

SEQ ID NO: 3334 - DNA, 60 bp, Artificial Sequence
  Description of Artificial Sequence: targeting sequence/synthetic sequence
cttggcctcaagagcttggtgagcaaaggtaccctggtgcagaccaaaggtaccggtgct

SEQ ID NO: 3335 - DNA, 60 bp, Artificial Sequence
  Description of Artificial Sequence: targeting sequence/synthetic sequence
gacgcgatgcagcatctggaccgccaggctgctgccctaactcgaaatggcggcaccttc

SEQ ID NO: 3336 - DNA, 60 bp, Artificial Sequence
  Description of Artificial Sequence: targeting sequence/synthetic sequence
acccaggccaagttcgtgagcaaccagaccgagctggaccgggaggtgctggtgggcaag

SEQ ID NO: 3337 - DNA, 60 bp, Artificial Sequence
  Description of Artificial Sequence: targeting sequence/synthetic sequence
atcaccaacctgatgaccggccagaccgccaacgccaccagcctgctcggcaccatgacc

SEQ ID NO: 3338 - DNA, 60 bp, Artificial Sequence
  Description of Artificial Sequence: targeting sequence/synthetic sequence
atcggcaacgacatccagatcctgcggagctccaccaacatcgccatcgagaagctgaac

SEQ ID NO: 3339 - DNA, 60 bp, Artificial Sequence
  Description of Artificial Sequence: targeting sequence/synthetic sequence
caatctgcagagttcgtgaatgatctaaagcgggccaacagcaacctggtggctgcctat

SEQ ID NO: 3340 - DNA, 60 bp, Artificial Sequence
  Description of Artificial Sequence: targeting sequence/synthetic sequence
ttttataggcaagtgaatcaaatcagtggagctcacaatacctcagacaagcaaacccct

SEQ ID NO: 3341 - DNA, 60 bp, Artificial Sequence
  Description of Artificial Sequence: targeting sequence/synthetic sequence
gccctggtgaaggccaacgagaacgccgctgccatcctgaacctgaagaacgccatccag

SEQ ID NO: 3342 - DNA, 60 bp, Artificial Sequence
  Description of Artificial Sequence: targeting sequence/synthetic sequence
cgagaatcccttctggatggcggaaataaagtagtcataagtggcttcggtgacccactg

SEQ ID NO: 3343 - DNA, 60 bp, Artificial Sequence
  Description of Artificial Sequence: targeting sequence/synthetic sequence
tggaacaccgtggaggacagcatcattcggaccggcttccagggcgagagcggccacgac

SEQ ID NO: 3344 - DNA, 60 bp, Artificial Sequence
  Description of Artificial Sequence: targeting sequence/synthetic sequence
acttctgaggaaaactaccaagctcttgacgcagatttcaggaaattaagacaacaggat

SEQ ID NO: 3345 - DNA, 60 bp, Artificial Sequence
  Description of Artificial Sequence: targeting sequence/synthetic sequence
agcatcgacagcggcatcagctccctgagctacaaccggaacgaggtgctggccagcaac

SEQ ID NO: 3346 - DNA, 60 bp, Artificial Sequence
  Description of Artificial Sequence: targeting sequence/synthetic sequence
cagaaggagtgggacaaggtggtcaacacccccaacagcctggagaagcagaagggcgtg

SEQ ID NO: 3347 - DNA, 60 bp, Artificial Sequence
  Description of Artificial Sequence: targeting sequence/synthetic sequence
ctgctccccaacaagagcggcaagaaaggcaacagcgccgacctgaccagccccgagaag

SEQ ID NO: 3348 - DNA, 60 bp, Artificial Sequence
  Description of Artificial Sequence: targeting sequence/synthetic sequence
tgtgttgctaaagaggccacagaggcagccaagtgtaacctgctggcagaaaagcaatat

SEQ ID NO: 3349 - DNA, 60 bp, Artificial Sequence
  Description of Artificial Sequence: targeting sequence/synthetic sequence
gaggacagccagtctgaagacaggaatgacctaaaggcatcccccaccttgggcaagagg

SEQ ID NO: 3350 - DNA, 60 bp, Artificial Sequence
  Description of Artificial Sequence: targeting sequence/synthetic sequence
ggcgcccggagctccgtgctgagcggcaagaaaaccgacgagctggagaaggtgcggctg

SEQ ID NO: 3351 - DNA, 60 bp, Artificial Sequence
  Description of Artificial Sequence: targeting sequence/synthetic sequence
ggaacccagctcaatgctgtgaataactccctgactccgcaatcaaccaaggttcccagc

SEQ ID NO: 3352 - DNA, 60 bp, Artificial Sequence
  Description of Artificial Sequence: targeting sequence/synthetic sequence
ttcagcgccgctctgaagggcaccgacgtgaagaccaacggcaagtacagcgacatcctg

SEQ ID NO: 3353 - DNA, 60 bp, Artificial Sequence
  Description of Artificial Sequence: targeting sequence/synthetic sequence
gccagcggcgtggccgtgagcaaggtgctgcacctggagggcgaggtgaacaagatcaag

SEQ ID NO: 3354 - DNA, 60 bp, Artificial Sequence
  Description of Artificial Sequence: targeting sequence/synthetic sequence
aacgctcagaacaacggctccaattttcagctggaggaaatttcccgggctcagcttgtg

SEQ ID NO: 3355 - DNA, 60 bp, Artificial Sequence
  Description of Artificial Sequence: targeting sequence/synthetic sequence
cgccgagccgcgcaggccactgggcccctccaggacaacgagctgccggggctggatgag

SEQ ID NO: 3356 - DNA, 60 bp, Artificial Sequence
  Description of Artificial Sequence: targeting sequence/synthetic sequence
atcagcgacatcaacgacgagcggctgcagcaaggcgtgagcctgctccgggaccacgtg

SEQ ID NO: 3357 - DNA, 60 bp, Artificial Sequence
  Description of Artificial Sequence: targeting sequence/synthetic sequence
cacgtggaagagctgggagtggctggaaacatcgtgcgccacattcctgacagaggcgct

SEQ ID NO: 3358 - DNA, 60 bp, Artificial Sequence
  Description of Artificial Sequence: targeting sequence/synthetic sequence
cccgaggtgatcgcccgggccgacaacgacgtgaacagctccctggcccacggccacacc

SEQ ID NO: 3359 - DNA, 60 bp, Artificial Sequence
  Description of Artificial Sequence: targeting sequence/synthetic sequence
ccattgaagcagagagtggaagcctccatctcaaaggcaaactcatttttgggggagaaa

SEQ ID NO: 3360 - DNA, 60 bp, Artificial Sequence
  Description of Artificial Sequence: targeting sequence/synthetic sequence
gtggctggaaacatcgtgcgccacattcctgacagaggcgctcccaccagagcctccgaa

SEQ ID NO: 3361 - DNA, 60 bp, Artificial Sequence
  Description of Artificial Sequence: targeting sequence/synthetic sequence
atcgtggctgccatccaggccgagaagaaccgcgctggctcctcgcgccagtccattcag

SEQ ID NO: 3362 - DNA, 60 bp, Artificial Sequence
  Description of Artificial Sequence: targeting sequence/synthetic sequence
gacaacgagctgccggggctggatgagaggccgccgcgcgcccacgcacagcacttccac

SEQ ID NO: 3363 - DNA, 60 bp, Artificial Sequence
  Description of Artificial Sequence: targeting sequence/synthetic sequence
gacgaggtgctgaacgaggtgctggtggtccccaacatcaaggagagccaccataccaca

SEQ ID NO: 3364 - DNA, 60 bp, Artificial Sequence
  Description of Artificial Sequence: targeting sequence/synthetic sequence
atcgccgtgagcaaggtgctgcacctggagggcgaggtgaacaagatcaagagcgccctg

SEQ ID NO: 3365 - DNA, 60 bp, Artificial Sequence
  Description of Artificial Sequence: targeting sequence/synthetic sequence
ctgggcgtgtggagcaaccagctggacggcggagccggcgtggacaccgtgaagtacaac

SEQ ID NO: 3366 - DNA, 60 bp, Artificial Sequence
  Description of Artificial Sequence: targeting sequence/synthetic sequence
tcagacaatgagctccaggaaatgtccaatcagggaagtaagtacgtcaataaggaaatt

SEQ ID NO: 3367 - DNA, 60 bp, Artificial Sequence
  Description of Artificial Sequence: targeting sequence/synthetic sequence
ctgaacctggagggcaacggcgtggccaccgacgtgcccaccgccaccaagcggtggggc

SEQ ID NO: 3368 - DNA, 60 bp, Artificial Sequence
  Description of Artificial Sequence: targeting sequence/synthetic sequence
gaacattcagaaatgtctaacaatgtgagtgatccgaagggtccaccagccaagattgcc

SEQ ID NO: 3369 - DNA, 60 bp, Artificial Sequence
  Description of Artificial Sequence: targeting sequence/synthetic sequence
ggagtggctggaaacatcgtgcgccacattcctgacagaggcgctcccaccagagcctcc

SEQ ID NO: 3370 - DNA, 60 bp, Artificial Sequence
  Description of Artificial Sequence: targeting sequence/synthetic sequence
cagaccagcttctaccagggcgacgtgcagaacgccgtggagggcgccatggtgcgggtg

SEQ ID NO: 3371 - DNA, 60 bp, Artificial Sequence
  Description of Artificial Sequence: targeting sequence/synthetic sequence
gttggccctcccaggaagaaaagtcccaacgagctggtggatgatctctttaaaggtgcc

SEQ ID NO: 3372 - DNA, 60 bp, Artificial Sequence
  Description of Artificial Sequence: targeting sequence/synthetic sequence
accatctccaaaaccaaagggcagccccgagaaccacaggtgtacaccctgcccccatcc

SEQ ID NO: 3373 - DNA, 60 bp, Artificial Sequence
  Description of Artificial Sequence: targeting sequence/synthetic sequence
ctggacattgccttcaagctaaacaaccaaatcagagaaaatgcagaagtctccatggac

SEQ ID NO: 3374 - DNA, 60 bp, Artificial Sequence
  Description of Artificial Sequence: targeting sequence/synthetic sequence
atcaagccccctctgcccagcgtgaccaagctgaccgaggaccggtggaacaagccccag

SEQ ID NO: 3375 - DNA, 60 bp, Artificial Sequence
  Description of Artificial Sequence: targeting sequence/synthetic sequence
ctccagaagcacctagcagagctgaatcaccagaagcagctggagtccaataagatccca

SEQ ID NO: 3376 - DNA, 60 bp, Artificial Sequence
  Description of Artificial Sequence: targeting sequence/synthetic sequence
atccagggctccaatgacgtggagatccgggcagagggcaatagcaggttcacgtacact

SEQ ID NO: 3377 - DNA, 60 bp, Artificial Sequence
  Description of Artificial Sequence: targeting sequence/synthetic sequence
ctggccaacaagctgagcttcaacttcagcgacaagcaggacgtgcccgtgagcgagatc

SEQ ID NO: 3378 - DNA, 60 bp, Artificial Sequence
  Description of Artificial Sequence: targeting sequence/synthetic sequence
ttcggcggagacatcagcatcagcaacggcctgagcggcggactgaacggcaacaccgcc

SEQ ID NO: 3379 - DNA, 60 bp, Artificial Sequence
  Description of Artificial Sequence: targeting sequence/synthetic sequence
gagaaggatggagataacatcatctaccaggcctcttccccagatgaagctgctttggtg

SEQ ID NO: 3380 - DNA, 60 bp, Artificial Sequence
  Description of Artificial Sequence: targeting sequence/synthetic sequence
ctgaagggcgagaacagcatcaaggtggacgatcccacctacggcaaggtgagcggcgcc

SEQ ID NO: 3381 - DNA, 60 bp, Artificial Sequence
  Description of Artificial Sequence: targeting sequence/synthetic sequence
gagaaggacaagacgcgcgccgactccgtggccaacaagctgggcagcttcagcaagacg

SEQ ID NO: 3382 - DNA, 60 bp, Artificial Sequence
  Description of Artificial Sequence: targeting sequence/synthetic sequence
agcaagagcaccaccgacaatgacatcgcactgctgcacctggcccagcccgccaccctc

SEQ ID NO: 3383 - DNA, 60 bp, Artificial Sequence
  Description of Artificial Sequence: targeting sequence/synthetic sequence
accaaccatgccattgtgcagaccctggtcaattctgtcaattccagtatccccaaagcc

SEQ ID NO: 3384 - DNA, 60 bp, Artificial Sequence
  Description of Artificial Sequence: targeting sequence/synthetic sequence
gacattgccttcaagctaaacaaccaaatcagagaaaatgcagaagtctccatggacgtt

SEQ ID NO: 3385 - DNA, 60 bp, Artificial Sequence
  Description of Artificial Sequence: targeting sequence/synthetic sequence
cgagccgcgcaggccactgggcccctccaggacaacgagctgccggggctggatgagagg

SEQ ID NO: 3386 - DNA, 60 bp, Artificial Sequence
  Description of Artificial Sequence: targeting sequence/synthetic sequence
aaccttgatgaagaggtgaatgtaattcctccacacactccagttaggactgttatgaac

SEQ ID NO: 3387 - DNA, 60 bp, Artificial Sequence
  Description of Artificial Sequence: targeting sequence/synthetic sequence
ctgtggctggacggcaagcagaacaccgtgcccctggagaccgtgaagaccaacaagaaa

SEQ ID NO: 3388 - DNA, 60 bp, Artificial Sequence
  Description of Artificial Sequence: targeting sequence/synthetic sequence
aaagcgctccagagcaaccactttgagctctctttacgtacagaagcaacgcagggatta

SEQ ID NO: 3389 - DNA, 60 bp, Artificial Sequence
  Description of Artificial Sequence: targeting sequence/synthetic sequence
ttcgacttcaacttcgaccagcaaaccagccagaacatcaagaaccagctggccgagctg

SEQ ID NO: 3390 - DNA, 60 bp, Artificial Sequence
  Description of Artificial Sequence: targeting sequence/synthetic sequence
aacagcaacagcgtgagcttcaacctgctcgagcaggaccccagcggcgccaccacaaag

SEQ ID NO: 3391 - DNA, 60 bp, Artificial Sequence
  Description of Artificial Sequence: targeting sequence/synthetic sequence
gtgatcgtggagaagaccaagcagaccgtggccagcatcagctccggccccaagcacacc

SEQ ID NO: 3392 - DNA, 60 bp, Artificial Sequence
  Description of Artificial Sequence: targeting sequence/synthetic sequence
aacaaccagactcaagacccttctagaaatgagctacaggtccctaggagcttcgtggac

SEQ ID NO: 3393 - DNA, 60 bp, Artificial Sequence
  Description of Artificial Sequence: targeting sequence/synthetic sequence
accagaaataacatgatccagaccaagccaacaggaacccagcaatcgaccaatacagct

SEQ ID NO: 3394 - DNA, 60 bp, Artificial Sequence
  Description of Artificial Sequence: targeting sequence/synthetic sequence
acccagatcggcgagatcgtgaagaccgtggccaacaccgtggagagcgagatcaaggcc

SEQ ID NO: 3395 - DNA, 60 bp, Artificial Sequence
  Description of Artificial Sequence: targeting sequence/synthetic sequence
aaggcgcctgtggacctgctcggtgttgcccacaacaacctcatggcaatggcccaggag

SEQ ID NO: 3396 - DNA, 60 bp, Artificial Sequence
  Description of Artificial Sequence: targeting sequence/synthetic sequence
gttgttaaaaaagcagacatgatcaacaaaaatatgactcatcaggtccaagctgagaga

SEQ ID NO: 3397 - DNA, 60 bp, Artificial Sequence
  Description of Artificial Sequence: targeting sequence/synthetic sequence
gtagacacaggcattggcatgaccaaagctgatctcataaataatttgggaaccattgcc

SEQ ID NO: 3398 - DNA, 60 bp, Artificial Sequence
  Description of Artificial Sequence: targeting sequence/synthetic sequence
gccctgaacggcaacggcgacagcaacaatatggaccgggccgtgaagctgtaccggaag

SEQ ID NO: 3399 - DNA, 60 bp, Artificial Sequence
  Description of Artificial Sequence: targeting sequence/synthetic sequence
cagcggagacggttcgtgcagaacgccctgaacggcaacggcgacagcaacaatatggac

SEQ ID NO: 3400 - DNA, 60 bp, Artificial Sequence
  Description of Artificial Sequence: targeting sequence/synthetic sequence
acactgaccaaggcgcctgtggacctgctcggtgttgcccacaacaacctcatggcaatg

SEQ ID NO: 3401 - DNA, 60 bp, Artificial Sequence
  Description of Artificial Sequence: targeting sequence/synthetic sequence
gccaaatcagaacgagaggcgcaatttgtcttaaggaatgaaatacaaagagactctgca

SEQ ID NO: 3402 - DNA, 60 bp, Artificial Sequence
  Description of Artificial Sequence: targeting sequence/synthetic sequence
ggtttaaaaacccaacgaaatacatcaataaatatgcaactgccttcaagagagacaaac

SEQ ID NO: 3403 - DNA, 60 bp, Artificial Sequence
  Description of Artificial Sequence: targeting sequence/synthetic sequence
cagattctggctaagataccttctgaaaataacaaactaacgtactcacatggcaattat

SEQ ID NO: 3404 - DNA, 60 bp, Artificial Sequence
  Description of Artificial Sequence: targeting sequence/synthetic sequence
ggatccacatcagattcaaacctcaacaaatacagcaccattaacaagattccacagctc

SEQ ID NO: 3405 - DNA, 60 bp, Artificial Sequence
  Description of Artificial Sequence: targeting sequence/synthetic sequence
ttagcaatgaacctacataacaatgaagctggaaggcaggctgtcgccaagttgatgtca

SEQ ID NO: 3406 - DNA, 60 bp, Artificial Sequence
  Description of Artificial Sequence: targeting sequence/synthetic sequence
ctgctccgggacaccacacacatcagccaggaggtgatgccccagggcctgggcgacctg

SEQ ID NO: 3407 - DNA, 60 bp, Artificial Sequence
  Description of Artificial Sequence: targeting sequence/synthetic sequence
gggttccgaggacctgctggaccaaatggcatcccaggagaaaagggtcctgctggagag

SEQ ID NO: 3408 - DNA, 60 bp, Artificial Sequence
  Description of Artificial Sequence: targeting sequence/synthetic sequence
agcaaggccagcatgggcgagaccgccccccggaccaacttcaacaatgccgctatcaac

SEQ ID NO: 3409 - DNA, 60 bp, Artificial Sequence
  Description of Artificial Sequence: targeting sequence/synthetic sequence
gccctgctcctccagggctccaacgagatcgagatccgcgccgagggcaacagccgcttc

SEQ ID NO: 3410 - DNA, 60 bp, Artificial Sequence
  Description of Artificial Sequence: targeting sequence/synthetic sequence
gtggtcgagggcgtgacccggaacgccctgacccccctgacccccgtgaacaatctgccc

SEQ ID NO: 3411 - DNA, 60 bp, Artificial Sequence
  Description of Artificial Sequence: targeting sequence/synthetic sequence
catttgaacgaggcaactcaggggaaagaacattcagaaatgtctaacaatgtgagtgat

SEQ ID NO: 3412 - DNA, 60 bp, Artificial Sequence
  Description of Artificial Sequence: targeting sequence/synthetic sequence
ctgcaggacctgggcgtgtggagcaaccagctggacggcggagccggcgtggacaccgtg

SEQ ID NO: 3413 - DNA, 60 bp, Artificial Sequence
  Description of Artificial Sequence: targeting sequence/synthetic sequence
caccccacccccatctccaccgaggccaatagagttgaggcacatggtgaggccaccgcc

SEQ ID NO: 3414 - DNA, 60 bp, Artificial Sequence
  Description of Artificial Sequence: targeting sequence/synthetic sequence
ttggatcgcaacctggagaaaaacagcaccaagcaggagatcctggctgctcttgagaaa

SEQ ID NO: 3415 - DNA, 60 bp, Artificial Sequence
  Description of Artificial Sequence: targeting sequence/synthetic sequence
cggcagctggtgacgaactgcacccagcggctggagcagggtccctgcaaagaccttttc

SEQ ID NO: 3416 - DNA, 60 bp, Artificial Sequence
  Description of Artificial Sequence: targeting sequence/synthetic sequence
ctgggcaagaaccagaccctggccaccatcaaggccaaggagaaccagctgagccagatc

SEQ ID NO: 3417 - DNA, 60 bp, Artificial Sequence
  Description of Artificial Sequence: targeting sequence/synthetic sequence
cggaagctccaggccacggtgcaggagctccagaagcgcttggacaggctggaggagaca

SEQ ID NO: 3418 - DNA, 60 bp, Artificial Sequence
  Description of Artificial Sequence: targeting sequence/synthetic sequence
ccccatgacagagcaacaccccagctgccagcacagctgcaggagcttgagcatcgggtg

SEQ ID NO: 3419 - DNA, 60 bp, Artificial Sequence
  Description of Artificial Sequence: targeting sequence/synthetic sequence
gagaacgtgatccgggacgccgtgacctatacagagcacgccaagcgcaagacggtcacc

SEQ ID NO: 3420 - DNA, 60 bp, Artificial Sequence
  Description of Artificial Sequence: targeting sequence/synthetic sequence
ccggccagccgggccaacaccgtgaggagcttccaccacgaagaacatctggagaacatc

SEQ ID NO: 3421 - DNA, 60 bp, Artificial Sequence
  Description of Artificial Sequence: targeting sequence/synthetic sequence
ctgaagagcgtgggcctgaacctggagggcaacggcatcgccaccgacgtgcccagcgcc

SEQ ID NO: 3422 - DNA, 60 bp, Artificial Sequence
  Description of Artificial Sequence: targeting sequence/synthetic sequence
ggcgtgacccggaacgccctgacccccctgacccccgtgaacaatctgcccgacacccgg

SEQ ID NO: 3423 - DNA, 60 bp, Artificial Sequence
  Description of Artificial Sequence: targeting sequence/synthetic sequence
cttataaaggcccgggcccgcgagctctcttcaggccagaaggaccaaggccaggcagcc

SEQ ID NO: 3424 - DNA, 60 bp, Artificial Sequence
  Description of Artificial Sequence: targeting sequence/synthetic sequence
ggcctgcggcagctggacatgctggacctctccaataactcactggccagcgtgcccgag

SEQ ID NO: 3425 - DNA, 60 bp, Artificial Sequence
  Description of Artificial Sequence: targeting sequence/synthetic sequence
gatgccacactcaagtccctcaacaaccagattgagagcatccgcagccccgagggctcc

SEQ ID NO: 3426 - DNA, 60 bp, Artificial Sequence
  Description of Artificial Sequence: targeting sequence/synthetic sequence
agacaagggatgggggacatggctgtgtccaactccattgggagcaacgtgtttgacatc

SEQ ID NO: 3427 - DNA, 60 bp, Artificial Sequence
  Description of Artificial Sequence: targeting sequence/synthetic sequence
aataaccgtgataatacctacaaccgagtgtcagaggatctgagaagcagaattgaagtc

SEQ ID NO: 3428 - DNA, 60 bp, Artificial Sequence
  Description of Artificial Sequence: targeting sequence/synthetic sequence
aagctgctcgacaacaccatctacacccagaacgagggcttcaacatcgccagcaagaac

SEQ ID NO: 3429 - DNA, 60 bp, Artificial Sequence
  Description of Artificial Sequence: targeting sequence/synthetic sequence
atcaacaagaaaatcattcagcccggcgccgaggaccagatcaagggcctgatgaccaac

SEQ ID NO: 3430 - DNA, 60 bp, Artificial Sequence
  Description of Artificial Sequence: targeting sequence/synthetic sequence
atcagcaaccgggtgggcgtgagcatccggaccggcaccgccttccagcccgaccccgcc

SEQ ID NO: 3431 - DNA, 60 bp, Artificial Sequence
  Description of Artificial Sequence: targeting sequence/synthetic sequence
tacaacagccggctgagcgaggtgaacatcgcccagaacaatgacatcatttacaacagc

SEQ ID NO: 3432 - DNA, 60 bp, Artificial Sequence
  Description of Artificial Sequence: targeting sequence/synthetic sequence
gccgtggagaacgccgtggcccgggtggccgacaccatcggcagcggccccagcaacagc

SEQ ID NO: 3433 - DNA, 60 bp, Artificial Sequence
  Description of Artificial Sequence: targeting sequence/synthetic sequence
ttgcaccgcctgggtcatcctgagcccaaccatgtgacggaggcctctgagctgctgcga

SEQ ID NO: 3434 - DNA, 60 bp, Artificial Sequence
  Description of Artificial Sequence: targeting sequence/synthetic sequence
cttcctgaaactgcaaactccgtcaccctcagtgacttgcaacctggtgttcagtataac

SEQ ID NO: 3435 - DNA, 60 bp, Artificial Sequence
  Description of Artificial Sequence: targeting sequence/synthetic sequence
ctgatcgcccccaagaaaaccaagccccctgtgcccagcgtgcagaagctggtggaggac

SEQ ID NO: 3436 - DNA, 60 bp, Artificial Sequence
  Description of Artificial Sequence: targeting sequence/synthetic sequence
aagagcggcaagaaaggcaacagcgccgacctgaccagccccgagaagatccaggccatc

SEQ ID NO: 3437 - DNA, 60 bp, Artificial Sequence
  Description of Artificial Sequence: targeting sequence/synthetic sequence
ctaaaaggcaaagaccttgtcgcccgagaatcccttctggatggcggaaataaagtagtc

SEQ ID NO: 3438 - DNA, 60 bp, Artificial Sequence
  Description of Artificial Sequence: targeting sequence/synthetic sequence
tcgtgggacacagccaaggaggatgaaaaccgcaataagaatcgatatgggaacatcata

SEQ ID NO: 3439 - DNA, 60 bp, Artificial Sequence
  Description of Artificial Sequence: targeting sequence/synthetic sequence
gagtacttcgcccccgccaacaccgacgccaacaatatcgagggccaggccatccggtac

SEQ ID NO: 3440 - DNA, 60 bp, Artificial Sequence
  Description of Artificial Sequence: targeting sequence/synthetic sequence
caaaagtctaaagcatcacaaggtagtgaccttgaacaaaatgaagcctcaagaaagaat

SEQ ID NO: 3441 - DNA, 60 bp, Artificial Sequence
  Description of Artificial Sequence: targeting sequence/synthetic sequence
ctgcggagcgtgggcctgaacctggagggcaacggcgtggccaccgacgtgcccagcgcc

SEQ ID NO: 3442 - DNA, 60 bp, Artificial Sequence
  Description of Artificial Sequence: targeting sequence/synthetic sequence
cagaacccctccttgtcgggtagccggaatggggaggagaacatcatcgataacccttat

SEQ ID NO: 3443 - DNA, 60 bp, Artificial Sequence
  Description of Artificial Sequence: targeting sequence/synthetic sequence
cagcgccgtacgtccatgggtgggacacagcagcaatttgtggagggggtccgcatggaa

SEQ ID NO: 3444 - DNA, 60 bp, Artificial Sequence
  Description of Artificial Sequence: targeting sequence/synthetic sequence
ggcgacgccgctgagcacaacaaggtggtcaccaaggacttcgacgtgatccggaacgtg

SEQ ID NO: 3445 - DNA, 60 bp, Artificial Sequence
  Description of Artificial Sequence: targeting sequence/synthetic sequence
ttggaccaccgaggccggaccttggaaatacctggcaactctgatcccaatatgatccct

SEQ ID NO: 3446 - DNA, 60 bp, Artificial Sequence
  Description of Artificial Sequence: targeting sequence/synthetic sequence
atcgccgtgagcaaggtgctgcacctggagggcgaggtgaacaagatcaagaacgccctg

SEQ ID NO: 3447 - DNA, 60 bp, Artificial Sequence
  Description of Artificial Sequence: targeting sequence/synthetic sequence
cagatcagcgacatcaacgacgagaacctgcagcaaggcatctacctgctccgggaccac

SEQ ID NO: 3448 - DNA, 60 bp, Artificial Sequence
  Description of Artificial Sequence: targeting sequence/synthetic sequence
ctttcactagacacgtccaagaaccagttctccctgagactgaactctgtgaccgctgcg

SEQ ID NO: 3449 - DNA, 60 bp, Artificial Sequence
  Description of Artificial Sequence: targeting sequence/synthetic sequence
ttttcctcagccaataaccgtgataatacctacaaccgagtgtcagaggatctgagaagc

SEQ ID NO: 3450 - DNA, 60 bp, Artificial Sequence
  Description of Artificial Sequence: targeting sequence/synthetic sequence
cggatccacaacagcaacatcctggacgagcggcagggcctgatgcacgagctgatggag

SEQ ID NO: 3451 - DNA, 60 bp, Artificial Sequence
  Description of Artificial Sequence: targeting sequence/synthetic sequence
ggcgccctggagatctacaagaacaatacccacgacctggtgggcgacgtgcggctggcc

SEQ ID NO: 3452 - DNA, 60 bp, Artificial Sequence
  Description of Artificial Sequence: targeting sequence/synthetic sequence
gagaccagcaacgtgctgcggaacatcgagaacgccgtgggcagcgcccgggacgatgtg

SEQ ID NO: 3453 - DNA, 60 bp, Artificial Sequence
  Description of Artificial Sequence: targeting sequence/synthetic sequence
ctggtgctgggcaagaaccagaccctggccaccatcaaggccaaggagaaccagctgagc

SEQ ID NO: 3454 - DNA, 60 bp, Artificial Sequence
  Description of Artificial Sequence: targeting sequence/synthetic sequence
acctaccgggagcgccattcggaagtggttggcggccatcacacctccattaacgacctg

SEQ ID NO: 3455 - DNA, 60 bp, Artificial Sequence
  Description of Artificial Sequence: targeting sequence/synthetic sequence
gacctgatcaccgaggtggcccagaacgccctggccctgagcctgcccaagccccagagc

SEQ ID NO: 3456 - DNA, 60 bp, Artificial Sequence
  Description of Artificial Sequence: targeting sequence/synthetic sequence
ctcttggaacactccctctcgacaaacaaattggaaaaacagattttggaccagaccagt

SEQ ID NO: 3457 - DNA, 60 bp, Artificial Sequence
  Description of Artificial Sequence: targeting sequence/synthetic sequence
cgggacaagcggttccactacgaccggaacaatatcgccgtgggcgccgacgagagcgtg

SEQ ID NO: 3458 - DNA, 60 bp, Artificial Sequence
  Description of Artificial Sequence: targeting sequence/synthetic sequence
aaccttaaaatacgtcagggtttgagtcacactgctgacatgcaaacacgtgaagttctg

SEQ ID NO: 3459 - DNA, 60 bp, Artificial Sequence
  Description of Artificial Sequence: targeting sequence/synthetic sequence
cccgccaacacccacaacaataacatcgagggccaggccatcgtgtaccagaacaagttc

SEQ ID NO: 3460 - DNA, 60 bp, Artificial Sequence
  Description of Artificial Sequence: targeting sequence/synthetic sequence
tctcggaccctgtacagcagcagccccagagtcctaagcaacaacagtgacgccaacttg

SEQ ID NO: 3461 - DNA, 60 bp, Artificial Sequence
  Description of Artificial Sequence: targeting sequence/synthetic sequence
aagatcggcaacgacatccagatcctgcggagctccaccaacatcgccatcgagaagctg

SEQ ID NO: 3462 - DNA, 60 bp, Artificial Sequence
  Description of Artificial Sequence: targeting sequence/synthetic sequence
ctcatccagggctccaatgacgtggagatccgggcagagggcaatagcaggttcacgtac

SEQ ID NO: 3463 - DNA, 60 bp, Artificial Sequence
  Description of Artificial Sequence: targeting sequence/synthetic sequence
gtgatcgtggagaagaccaagcagaccctggccagcgtgagctccggccccaagcacacc

SEQ ID NO: 3464 - DNA, 60 bp, Artificial Sequence
  Description of Artificial Sequence: targeting sequence/synthetic sequence
atgggcgcccggggcagcgtgctgagcggcaagaaaaccgacgagctggagaaggtgcgg

SEQ ID NO: 3465 - DNA, 60 bp, Artificial Sequence
  Description of Artificial Sequence: targeting sequence/synthetic sequence
gtggtcgaggccgtggagaacgccgtggcccgggtggccgacaccatcggcagcggcccc

SEQ ID NO: 3466 - DNA, 60 bp, Artificial Sequence
  Description of Artificial Sequence: targeting sequence/synthetic sequence
tcttcctccagcccctacgtgtccaatgctgtgcagagggacgcgccgctcgaatacgat

SEQ ID NO: 3467 - DNA, 60 bp, Artificial Sequence
  Description of Artificial Sequence: targeting sequence/synthetic sequence
ggaaatcttgcaactaaagcccggaatgaaggtagaatcagagacagtgttgatctgcaa

SEQ ID NO: 3468 - DNA, 60 bp, Artificial Sequence
  Description of Artificial Sequence: targeting sequence/synthetic sequence
gcaaaatctgcaaatgccattgagacgaaaggtttcaataaaaaggatctggagttagct

SEQ ID NO: 3469 - DNA, 60 bp, Artificial Sequence
  Description of Artificial Sequence: targeting sequence/synthetic sequence
agggcccgggtagatcctactgttgaaaatgaggaaacattcatgaacagagttgaagtt

SEQ ID NO: 3470 - DNA, 60 bp, Artificial Sequence
  Description of Artificial Sequence: targeting sequence/synthetic sequence
aagaaccagagcatcgacagcggcatcagctccctgagctacaaccggaacgaggtgctg

SEQ ID NO: 3471 - DNA, 60 bp, Artificial Sequence
  Description of Artificial Sequence: targeting sequence/synthetic sequence
gccgtgagcaaggtgctgcacctggagggcgaggtgaacaagatcaagagcgccctgctc

SEQ ID NO: 3472 - DNA, 60 bp, Artificial Sequence
  Description of Artificial Sequence: targeting sequence/synthetic sequence
taccgggagggcgtggccacccagaccacagcctacggcaagcggaccgagaacgtgcag

SEQ ID NO: 3473 - DNA, 60 bp, Artificial Sequence
  Description of Artificial Sequence: targeting sequence/synthetic sequence
gacaacggcgtggacttcaacaagaacaccgccctggacaagaactacctgctcaacaat

SEQ ID NO: 3474 - DNA, 60 bp, Artificial Sequence
  Description of Artificial Sequence: targeting sequence/synthetic sequence
ctcaaggccaagatcgaccagaacgtggaggagctcaagggacgccttacgccctacgct

SEQ ID NO: 3475 - DNA, 60 bp, Artificial Sequence
  Description of Artificial Sequence: targeting sequence/synthetic sequence
atcagcttcaaccccaaggagaacaagatcaccgtgaagagcaagaacctgcccgagctg

SEQ ID NO: 3476 - DNA, 60 bp, Artificial Sequence
  Description of Artificial Sequence: targeting sequence/synthetic sequence
caggtgtacaccctgcccccatcccgggaggagatgaccaagaaccaggtcagcctgacc

SEQ ID NO: 3477 - DNA, 60 bp, Artificial Sequence
  Description of Artificial Sequence: targeting sequence/synthetic sequence
cctctcttcaatgatattgctgcaggcatcccctccatcacagcatacagtaagaatggc

SEQ ID NO: 3478 - DNA, 60 bp, Artificial Sequence
  Description of Artificial Sequence: targeting sequence/synthetic sequence
gctgctgccatgcccaggtcagcacccaatgacattctggacctccgcctccccccggag

SEQ ID NO: 3479 - DNA, 60 bp, Artificial Sequence
  Description of Artificial Sequence: targeting sequence/synthetic sequence
gtgccccactctcggaattccatcaccctcaccaacctcactccaggcacagagtatgtg

SEQ ID NO: 3480 - DNA, 60 bp, Artificial Sequence
  Description of Artificial Sequence: targeting sequence/synthetic sequence
caggacctgggcgtgtggagcaaccagctggacggcggagccggcgtggacaccgtgaag

SEQ ID NO: 3481 - DNA, 60 bp, Artificial Sequence
  Description of Artificial Sequence: targeting sequence/synthetic sequence
ctacatctagaaggcaacaaattgcaagtactgggaaaagatctcctcttgccgcagccg

SEQ ID NO: 3482 - DNA, 60 bp, Artificial Sequence
  Description of Artificial Sequence: targeting sequence/synthetic sequence
ctgcagcggatccacaacagcaacatcctggacgagcggcagggcctgatgcacgagctg

SEQ ID NO: 3483 - DNA, 60 bp, Artificial Sequence
  Description of Artificial Sequence: targeting sequence/synthetic sequence
cgaggacctgctggaccaaatggcatcccaggagaaaagggtcctgctggagagcgtggt

SEQ ID NO: 3484 - DNA, 60 bp, Artificial Sequence
  Description of Artificial Sequence: targeting sequence/synthetic sequence
gaagagctgggagtggctggaaacatcgtgcgccacattcctgacagaggcgctcccacc

SEQ ID NO: 3485 - DNA, 60 bp, Artificial Sequence
  Description of Artificial Sequence: targeting sequence/synthetic sequence
cggaccctgaacaccctggtgcaggacaacagctacgtgccccggtacgacagcaacggc

SEQ ID NO: 3486 - DNA, 60 bp, Artificial Sequence
  Description of Artificial Sequence: targeting sequence/synthetic sequence
accaaccagctgcggagcgtgggcctgaacctggagggcaacggcgtggccaccgacgtg

SEQ ID NO: 3487 - DNA, 60 bp, Artificial Sequence
  Description of Artificial Sequence: targeting sequence/synthetic sequence
tacgcccagaagagccccaccacactgcagcggatcaccatgaccaacagcgtggacgat

SEQ ID NO: 3488 - DNA, 60 bp, Artificial Sequence
  Description of Artificial Sequence: targeting sequence/synthetic sequence
atcgcccccaagaaaaccaagccccctgtgcccagcgtgcagaagctggtggaggaccgg

SEQ ID NO: 3489 - DNA, 60 bp, Artificial Sequence
  Description of Artificial Sequence: targeting sequence/synthetic sequence
ctggccctgaacgtgggcaacgagaccgccaagggcaacttcgagaacgccttcgagatc

SEQ ID NO: 3490 - DNA, 60 bp, Artificial Sequence
  Description of Artificial Sequence: targeting sequence/synthetic sequence
gcaactaaagcccggaatgaaggtagaatcagagacagtgttgatctgcaatcattgatg

SEQ ID NO: 3491 - DNA, 60 bp, Artificial Sequence
  Description of Artificial Sequence: targeting sequence/synthetic sequence
ggcgtggactactatgacaacgtgcggaacgtggagaacgtgatcggcaccagcatgaag

SEQ ID NO: 3492 - DNA, 60 bp, Artificial Sequence
  Description of Artificial Sequence: targeting sequence/synthetic sequence
gaccggatcaccggcgacgcccaggccaacgtgctgcggggcgccggcggagccgacgtg

SEQ ID NO: 3493 - DNA, 60 bp, Artificial Sequence
  Description of Artificial Sequence: targeting sequence/synthetic sequence
attgaccttaaagatgacctaggaaacacgctggagaagaaaggtggcaaggagtttgtg

SEQ ID NO: 3494 - DNA, 60 bp, Artificial Sequence
  Description of Artificial Sequence: targeting sequence/synthetic sequence
cagttcctgaaccagcacctgaaccccgccatcgagagcgacaacaatttcaccgacacc

SEQ ID NO: 3495 - DNA, 60 bp, Artificial Sequence
  Description of Artificial Sequence: targeting sequence/synthetic sequence
cggttcaacgagatcgaccggaagctggacagccacagcgccgctctggaggaaatcacc

SEQ ID NO: 3496 - DNA, 60 bp, Artificial Sequence
  Description of Artificial Sequence: targeting sequence/synthetic sequence
gccctgcacactgccaccttccaggctctgcagagggacctggagctgcaggcggcctcc

SEQ ID NO: 3497 - DNA, 60 bp, Artificial Sequence
  Description of Artificial Sequence: targeting sequence/synthetic sequence
ctgcggctgatgaaggacacccagaccatcagccagaccgtggccctgaccgagggcctg

SEQ ID NO: 3498 - DNA, 60 bp, Artificial Sequence
  Description of Artificial Sequence: targeting sequence/synthetic sequence
ctgaccaaggcgcctgtggacctgctcggtgttgcccacaacaacctcatggcaatggcc

SEQ ID NO: 3499 - DNA, 60 bp, Artificial Sequence
  Description of Artificial Sequence: targeting sequence/synthetic sequence
taccaaggtggcacttactcaaaagcatctactcctaatggttatgataatggcattatt

SEQ ID NO: 3500 - DNA, 60 bp, Artificial Sequence
  Description of Artificial Sequence: targeting sequence/synthetic sequence
cccaggagccccgtcataggaagtgaggtcttcctgcccaacagcaaccacgtggccagt

SEQ ID NO: 3501 - DNA, 60 bp, Artificial Sequence
  Description of Artificial Sequence: targeting sequence/synthetic sequence
aagctccaggccacggtgcaggagctccagaagcgcttggacaggctggaggagacagtc

SEQ ID NO: 3502 - DNA, 60 bp, Artificial Sequence
  Description of Artificial Sequence: targeting sequence/synthetic sequence
ttcatcgagcagaccagcttctaccagggcgacgtgcagaacgccgtggagggcgccatg

SEQ ID NO: 3503 - DNA, 60 bp, Artificial Sequence
  Description of Artificial Sequence: targeting sequence/synthetic sequence
ctgatcaccatcaccaacgacaccacagtgaccaacgacaacccccagagccggttcttt

SEQ ID NO: 3504 - DNA, 60 bp, Artificial Sequence
  Description of Artificial Sequence: targeting sequence/synthetic sequence
actgccaccttccaggctctgcagagggacctggagctgcaggcggcctccagccgggaa

SEQ ID NO: 3505 - DNA, 60 bp, Artificial Sequence
  Description of Artificial Sequence: targeting sequence/synthetic sequence
agcatcagctacacccagcaaaactacgtgagcgaggtggagcagcaaaacagcaagagc

SEQ ID NO: 3506 - DNA, 60 bp, Artificial Sequence
  Description of Artificial Sequence: targeting sequence/synthetic sequence
gagcagaccagcttctaccagggcgacgtgcagaacgccgtggagggcgccatggtgcgg

SEQ ID NO: 3507 - DNA, 60 bp, Artificial Sequence
  Description of Artificial Sequence: targeting sequence/synthetic sequence
gatgacctaggaaacacgctggagaagaaaggtggcaaggagtttgtggaagctgtcctg

SEQ ID NO: 3508 - DNA, 60 bp, Artificial Sequence
  Description of Artificial Sequence: targeting sequence/synthetic sequence
aagttcgtgagcaaccagaccgagctggaccgggaggtgctggtgggcaaggtgaagcac

SEQ ID NO: 3509 - DNA, 60 bp, Artificial Sequence
  Description of Artificial Sequence: targeting sequence/synthetic sequence
gctaaaaatctcttcctgaaccattcagaaaatgcaacagcgaaagacattgcccctact

SEQ ID NO: 3510 - DNA, 60 bp, Artificial Sequence
  Description of Artificial Sequence: targeting sequence/synthetic sequence
ctcctgggatccacatcagattcaaacctcaacaaatacagcaccattaacaagattcca

SEQ ID NO: 3511 - DNA, 60 bp, Artificial Sequence
  Description of Artificial Sequence: targeting sequence/synthetic sequence
ctgggaggtaacgagattcagagggatccaggttatcccagagatttaatgccaccacct

SEQ ID NO: 3512 - DNA, 60 bp, Artificial Sequence
  Description of Artificial Sequence: targeting sequence/synthetic sequence
ctgagggcccggctgctgccccatgccaatgaggtgagccagaagatcggggacaacctg

SEQ ID NO: 3513 - DNA, 60 bp, Artificial Sequence
  Description of Artificial Sequence: targeting sequence/synthetic sequence
tacaaccggaacgaggtgctggccagcaacggcgacaagatcgagagcttcgtgcccaag

SEQ ID NO: 3514 - DNA, 60 bp, Artificial Sequence
  Description of Artificial Sequence: targeting sequence/synthetic sequence
cagagcactgattatggtaacttcctggccaacgaggcatcacctctgacggtgtcagtc

SEQ ID NO: 3515 - DNA, 60 bp, Artificial Sequence
  Description of Artificial Sequence: targeting sequence/synthetic sequence
acccccaagaaagtgaagccccctctgcccagcgtgaccaagctgaccgaggaccggtgg

SEQ ID NO: 3516 - DNA, 60 bp, Artificial Sequence
  Description of Artificial Sequence: targeting sequence/synthetic sequence
atcaacaattggatcagcctgagcgacaacgacaccttcgccgctagcgagcacggcaag

SEQ ID NO: 3517 - DNA, 60 bp, Artificial Sequence
  Description of Artificial Sequence: targeting sequence/synthetic sequence
ggcaaggaggtgcacgctctgaagagactgagggactcggccaatgccaatgatgtggaa

SEQ ID NO: 3518 - DNA, 60 bp, Artificial Sequence
  Description of Artificial Sequence: targeting sequence/synthetic sequence
aagaaaggccacgtgagcgacctgaccgcccccgacaagatccagaccatcgtgaacctg

SEQ ID NO: 3519 - DNA, 60 bp, Artificial Sequence
  Description of Artificial Sequence: targeting sequence/synthetic sequence
gtgctgggcggagacgcccaggagcacaacaaggtggtcaccaaggacttcgacgagatc

SEQ ID NO: 3520 - DNA, 60 bp, Artificial Sequence
  Description of Artificial Sequence: targeting sequence/synthetic sequence
catggaatcatccacagggacttgaaaccggacaatatgcttatttctaatgagggtcat

SEQ ID NO: 3521 - DNA, 60 bp, Artificial Sequence
  Description of Artificial Sequence: targeting sequence/synthetic sequence
gatggggatgtaaatgagctgatggatgtagttctccaccatgttccagaggcaaagctg

SEQ ID NO: 3522 - DNA, 60 bp, Artificial Sequence
  Description of Artificial Sequence: targeting sequence/synthetic sequence
tactataagggcaacatcattgccgaggccatcgagaagctggaccgggagggccagaag

SEQ ID NO: 3523 - DNA, 60 bp, Artificial Sequence
  Description of Artificial Sequence: targeting sequence/synthetic sequence
cagatgagaatggagttagagagacctggtggaaatgagattactcgaggaggctccacc

SEQ ID NO: 3524 - DNA, 60 bp, Artificial Sequence
  Description of Artificial Sequence: targeting sequence/synthetic sequence
agccagatcagcgacatcaacgacgagcggctgcagcaaggcgtgagcctgctccgggac

SEQ ID NO: 3525 - DNA, 60 bp, Artificial Sequence
  Description of Artificial Sequence: targeting sequence/synthetic sequence
aaggagcaatgggtcaaggacgcgatgcagcatctggaccgccaggctgctgccctaact

SEQ ID NO: 3526 - DNA, 60 bp, Artificial Sequence
  Description of Artificial Sequence: targeting sequence/synthetic sequence
gacagccagtctgaagacaggaatgacctaaaggcatcccccaccttgggcaagaggaag

SEQ ID NO: 3527 - DNA, 60 bp, Artificial Sequence
  Description of Artificial Sequence: targeting sequence/synthetic sequence
ctgctcctgagcggcgacaagaactacctgatcagcaacctgagcaacaccatcgagaag

SEQ ID NO: 3528 - DNA, 60 bp, Artificial Sequence
  Description of Artificial Sequence: targeting sequence/synthetic sequence
aacgctgatgggaacgtggactaccacatgaactctgtccccatccagcaagagatcctg

SEQ ID NO: 3529 - DNA, 60 bp, Artificial Sequence
  Description of Artificial Sequence: targeting sequence/synthetic sequence
ctgatcattggcaacctggtgaccgccaacgccgagagcaacaagcagaacaccgccagc

SEQ ID NO: 3530 - DNA, 60 bp, Artificial Sequence
  Description of Artificial Sequence: targeting sequence/synthetic sequence
tactatttcgacaacaatagcaaggccgtgaccggcctgcagaccatcgacagcaagaaa

SEQ ID NO: 3531 - DNA, 60 bp, Artificial Sequence
  Description of Artificial Sequence: targeting sequence/synthetic sequence
gacgaggtgctgaacgaggtgctggtggtccccaacatcaaccagagccaccccaccaca

SEQ ID NO: 3532 - DNA, 60 bp, Artificial Sequence
  Description of Artificial Sequence: targeting sequence/synthetic sequence
atctacagcaacaatttcaacaatctggtgaagctggagcagagcctgggcgacggcgtg

SEQ ID NO: 3533 - DNA, 60 bp, Artificial Sequence
  Description of Artificial Sequence: targeting sequence/synthetic sequence
ggatacaaacacaccttgaaccagattgatgaagtaaaggtgtggcctcagcagccctcc

SEQ ID NO: 3534 - DNA, 60 bp, Artificial Sequence
  Description of Artificial Sequence: targeting sequence/synthetic sequence
ctgggcggagacgccgctgagcacaacaaggtggtcaccaaggacttcgacgtgatccgg

SEQ ID NO: 3535 - DNA, 60 bp, Artificial Sequence
  Description of Artificial Sequence: targeting sequence/synthetic sequence
ttcaacatcgccagcaagaacctgaagaccgagttcaacggccagaacaaggccgtgaac

SEQ ID NO: 3536 - DNA, 60 bp, Artificial Sequence
  Description of Artificial Sequence: targeting sequence/synthetic sequence
agctccgtgctgagcggcaagaaaaccgacgagctggagaaggtgcggctgcggcccggc

SEQ ID NO: 3537 - DNA, 60 bp, Artificial Sequence
  Description of Artificial Sequence: targeting sequence/synthetic sequence
catctgcagagcactgattatggtaacttcctggccaacgaggcatcacctctgacggtg

SEQ ID NO: 3538 - DNA, 60 bp, Artificial Sequence
  Description of Artificial Sequence: targeting sequence/synthetic sequence
caccagaacagccagacccaccaggccagcctgagcaagcagcccaccagccagccccgg

SEQ ID NO: 3539 - DNA, 60 bp, Artificial Sequence
  Description of Artificial Sequence: targeting sequence/synthetic sequence
aaactgcgcacagaaggagatggagtatacaccttaaatgataagaagcagtggataaat

SEQ ID NO: 3540 - DNA, 60 bp, Artificial Sequence
  Description of Artificial Sequence: targeting sequence/synthetic sequence
acccagaccgccttctaccagaacgacgtgcagaacgccgtggagcggagcatcgtgcgg

SEQ ID NO: 3541 - DNA, 60 bp, Artificial Sequence
  Description of Artificial Sequence: targeting sequence/synthetic sequence
gagatgctggagaaccagatcgccaccatccaccagagctgccccagccaggagcaccag

SEQ ID NO: 3542 - DNA, 60 bp, Artificial Sequence
  Description of Artificial Sequence: targeting sequence/synthetic sequence
gctcagaacaacggctccaattttcagctggaggaaatttcccgggctcagcttgtgccc

SEQ ID NO: 3543 - DNA, 60 bp, Artificial Sequence
  Description of Artificial Sequence: targeting sequence/synthetic sequence
aacctgagtagtaaattccagttttccagcaacaaggaacagaacggagtacaagatcct

SEQ ID NO: 3544 - DNA, 60 bp, Artificial Sequence
  Description of Artificial Sequence: targeting sequence/synthetic sequence
aaacgggacctgttctttaatgagattaaggcccgctctggccaggacgataagaccgtg

SEQ ID NO: 3545 - DNA, 60 bp, Artificial Sequence
  Description of Artificial Sequence: targeting sequence/synthetic sequence
ctgacctgggagagtgggcaggtcctgggggaccagacggtctcagacaatgagctccag

SEQ ID NO: 3546 - DNA, 60 bp, Artificial Sequence
  Description of Artificial Sequence: targeting sequence/synthetic sequence
acccagcgccgtacgtccatgggtgggacacagcagcaatttgtggagggggtccgcatg

SEQ ID NO: 3547 - DNA, 60 bp, Artificial Sequence
  Description of Artificial Sequence: targeting sequence/synthetic sequence
ccacccaaggccctgcacactgccaccttccaggctctgcagagggacctggagctgcag

SEQ ID NO: 3548 - DNA, 60 bp, Artificial Sequence
  Description of Artificial Sequence: targeting sequence/synthetic sequence
aaagatgacctaggaaacacgctggagaagaaaggtggcaaggagtttgtggaagctgtc

SEQ ID NO: 3549 - DNA, 60 bp, Artificial Sequence
  Description of Artificial Sequence: targeting sequence/synthetic sequence
ccgaaggagcaatgggtcaaggacgcgatgcagcatctggaccgccaggctgctgcccta

SEQ ID NO: 3550 - DNA, 60 bp, Artificial Sequence
  Description of Artificial Sequence: targeting sequence/synthetic sequence
agcaaggtgctgcacctggagggcgaggtgaacaagatcaagaacgccctgctcagcacc

SEQ ID NO: 3551 - DNA, 60 bp, Artificial Sequence
  Description of Artificial Sequence: targeting sequence/synthetic sequence
accctgaacgtcatcgagctcaacgtacaaaagacggtcgactacaccggccaggccaag

SEQ ID NO: 3552 - DNA, 60 bp, Artificial Sequence
  Description of Artificial Sequence: targeting sequence/synthetic sequence
ctgcacactgccaccttccaggctctgcagagggacctggagctgcaggcggcctccagc

SEQ ID NO: 3553 - DNA, 60 bp, Artificial Sequence
  Description of Artificial Sequence: targeting sequence/synthetic sequence
accctcgccatcggagacggcgccaacgatgtcgggatgatccagacagcccacgtgggt

SEQ ID NO: 3554 - DNA, 60 bp, Artificial Sequence
  Description of Artificial Sequence: targeting sequence/synthetic sequence
aaggcccgggcccgcgagctctcttcaggccagaaggaccaaggccaggcagccaacatg

SEQ ID NO: 3555 - DNA, 60 bp, Artificial Sequence
  Description of Artificial Sequence: targeting sequence/synthetic sequence
aagaacctgaacgtgaacgacgtgctgtacgccggccacaacagcacctgggacccccag

SEQ ID NO: 3556 - DNA, 60 bp, Artificial Sequence
  Description of Artificial Sequence: targeting sequence/synthetic sequence
ctgcccggcctgaagggcgagaacagcatcaaggtggacgatcccacctacggcaaggtg

SEQ ID NO: 3557 - DNA, 60 bp, Artificial Sequence
  Description of Artificial Sequence: targeting sequence/synthetic sequence
aagaaacagatcaacgattacgtggagaagggtactcaagggaaaattgtggatttggtc

SEQ ID NO: 3558 - DNA, 60 bp, Artificial Sequence
  Description of Artificial Sequence: targeting sequence/synthetic sequence
aagaactcagtgcatctccaaatgaacagcctcaaaaccgacgacacggccgtgtattat

SEQ ID NO: 3559 - DNA, 60 bp, Artificial Sequence
  Description of Artificial Sequence: targeting sequence/synthetic sequence
acaccacgaaaaagtaaccttgatgaagaggtgaatgtaattcctccacacactccagtt

SEQ ID NO: 3560 - DNA, 60 bp, Artificial Sequence
  Description of Artificial Sequence: targeting sequence/synthetic sequence
aaggatggagataacatcatctaccaggcctcttccccagatgaagctgctttggtgaaa

SEQ ID NO: 3561 - DNA, 60 bp, Artificial Sequence
  Description of Artificial Sequence: targeting sequence/synthetic sequence
gagtgggacaaggtggtcaacacccccaacagcctggagaagcagaagggcgtgaccaac

SEQ ID NO: 3562 - DNA, 60 bp, Artificial Sequence
  Description of Artificial Sequence: targeting sequence/synthetic sequence
gtggacatcgccagcaacatcattggcgacctgagctccctgcccatcgccggcaagatc

SEQ ID NO: 3563 - DNA, 60 bp, Artificial Sequence
  Description of Artificial Sequence: targeting sequence/synthetic sequence
gccatcggagacggcgccaacgatgtcgggatgatccagacagcccacgtgggtgtggga

SEQ ID NO: 3564 - DNA, 60 bp, Artificial Sequence
  Description of Artificial Sequence: targeting sequence/synthetic sequence
ggagaaaggggtgcccctgggttccgaggacctgctggaccaaatggcatcccaggagaa

SEQ ID NO: 3565 - DNA, 60 bp, Artificial Sequence
  Description of Artificial Sequence: targeting sequence/synthetic sequence
cccaaggccctgcacactgccaccttccaggctctgcagagggacctggagctgcaggcg

SEQ ID NO: 3566 - DNA, 60 bp, Artificial Sequence
  Description of Artificial Sequence: targeting sequence/synthetic sequence
tctgctgggacaggcccctctagtgcaacagtcaatgtgacaacccgaaagccaccacca

SEQ ID NO: 3567 - DNA, 60 bp, Artificial Sequence
  Description of Artificial Sequence: targeting sequence/synthetic sequence
atcaccatcaccaacgacaccacagtgaccaacgacaacccccagagccggttctttggc

SEQ ID NO: 3568 - DNA, 60 bp, Artificial Sequence
  Description of Artificial Sequence: targeting sequence/synthetic sequence
gtgaacttcaacttcaacggcctgaccggcaccggcgtgctgaccgagagcaacaagaaa

SEQ ID NO: 3569 - DNA, 60 bp, Artificial Sequence
  Description of Artificial Sequence: targeting sequence/synthetic sequence
ctcaccttccagcgcgccatgcacgactacaaccaggccgagatgaagcagcgcgacaac

SEQ ID NO: 3570 - DNA, 60 bp, Artificial Sequence
  Description of Artificial Sequence: targeting sequence/synthetic sequence
agcgccgagatcaccggcctgggcgccatccgggaggacaacaatatcaccctgaagctg

SEQ ID NO: 3571 - DNA, 60 bp, Artificial Sequence
  Description of Artificial Sequence: targeting sequence/synthetic sequence
gcaacctcctcgaacgcgggagcggaccccaataccactaacctgcgccccacaacgtac

SEQ ID NO: 3572 - DNA, 60 bp, Artificial Sequence
  Description of Artificial Sequence: targeting sequence/synthetic sequence
agcctgagctacaaccggaacgaggtgctggccagcaacggcgacaagatcgagagcttc

SEQ ID NO: 3573 - DNA, 60 bp, Artificial Sequence
  Description of Artificial Sequence: targeting sequence/synthetic sequence
cggccctactcggcgacggcggctgcggctactggaggcatggctaatgtaaaagcagcc

SEQ ID NO: 3574 - DNA, 60 bp, Artificial Sequence
  Description of Artificial Sequence: targeting sequence/synthetic sequence
aagtcaagcctcctgggatccacatcagattcaaacctcaacaaatacagcaccattaac

SEQ ID NO: 3575 - DNA, 60 bp, Artificial Sequence
  Description of Artificial Sequence: targeting sequence/synthetic sequence
ccctcggacacggccaagccagcggcccccggaggcgggcgggctgcccagctgaagctg

SEQ ID NO: 3576 - DNA, 60 bp, Artificial Sequence
  Description of Artificial Sequence: targeting sequence/synthetic sequence
aacaattggatcagcctgagcgacaacgacaccttcgccgctagcgagcacggcaagcgg

SEQ ID NO: 3577 - DNA, 60 bp, Artificial Sequence
  Description of Artificial Sequence: targeting sequence/synthetic sequence
ctgcaccacagcacgcaggagaacgccatcctggccatcgagcagtacgaggagctggtg

SEQ ID NO: 3578 - DNA, 60 bp, Artificial Sequence
  Description of Artificial Sequence: targeting sequence/synthetic sequence
ctcctaggtcagaccagagctaatcccatgtacaatgccgtgtccaacgcagacctgatg

SEQ ID NO: 3579 - DNA, 60 bp, Artificial Sequence
  Description of Artificial Sequence: targeting sequence/synthetic sequence
gtgaattttttgcacagtaataagttgactcacacagacttaaagcctgaaaacatctta

SEQ ID NO: 3580 - DNA, 60 bp, Artificial Sequence
  Description of Artificial Sequence: targeting sequence/synthetic sequence
cgggttaaaaaactcaatgaaatcagcaaactgggaatttctggtgacatagacctcacc

SEQ ID NO: 3581 - DNA, 60 bp, Artificial Sequence
  Description of Artificial Sequence: targeting sequence/synthetic sequence
gtgaacaatagcctgaacgtgaacttcggcgccatcagcgagggcaagatgcaggaggaa

SEQ ID NO: 3582 - DNA, 60 bp, Artificial Sequence
  Description of Artificial Sequence: targeting sequence/synthetic sequence
ttcctggtgaaccagatgatcaacgaggccaagaaacagctgctcgagttcgacacccag

SEQ ID NO: 3583 - DNA, 60 bp, Artificial Sequence
  Description of Artificial Sequence: targeting sequence/synthetic sequence
cggctggagagcgagtacaacatcaacaatatcgaggaagagctgaacaagaaagtgagc

SEQ ID NO: 3584 - DNA, 60 bp, Artificial Sequence
  Description of Artificial Sequence: targeting sequence/synthetic sequence
acggttgttcctgagaaggatggagataacatcatctaccaggcctcttccccagatgaa

SEQ ID NO: 3585 - DNA, 60 bp, Artificial Sequence
  Description of Artificial Sequence: targeting sequence/synthetic sequence
ttaaaccaacagcatagtcaaataaaagaaatagaaaatcagctcagaaggactagtatt

SEQ ID NO: 3586 - DNA, 60 bp, Artificial Sequence
  Description of Artificial Sequence: targeting sequence/synthetic sequence
ctggatggggatgtaaatgagctgatggatgtagttctccaccatgttccagaggcaaag

SEQ ID NO: 3587 - DNA, 60 bp, Artificial Sequence
  Description of Artificial Sequence: targeting sequence/synthetic sequence
atccggagcgccatcggcacccccctgcagaccatcagctccggcggaaccagcctgctc

SEQ ID NO: 3588 - DNA, 60 bp, Artificial Sequence
  Description of Artificial Sequence: targeting sequence/synthetic sequence
gaaactgcaaactccgtcaccctcagtgacttgcaacctggtgttcagtataacatcact

SEQ ID NO: 3589 - DNA, 60 bp, Artificial Sequence
  Description of Artificial Sequence: targeting sequence/synthetic sequence
aaggccagcatgggcgagaccgccccccggaccaacttcaacaatgccgctatcaactac

SEQ ID NO: 3590 - DNA, 60 bp, Artificial Sequence
  Description of Artificial Sequence: targeting sequence/synthetic sequence
aggctctccaaagaggtccagaatgccctggccagagcgagcaacacggcggaggagacc

SEQ ID NO: 3591 - DNA, 60 bp, Artificial Sequence
  Description of Artificial Sequence: targeting sequence/synthetic sequence
ctgcacggcagccggctgaacgaccggatcgccggcgacgatcaggacaacgagctgtgg

SEQ ID NO: 3592 - DNA, 60 bp, Artificial Sequence
  Description of Artificial Sequence: targeting sequence/synthetic sequence
gccaagccccctctgcccagcgtgagcaagctggtggaggacaagtggaacaagccccag

SEQ ID NO: 3593 - DNA, 60 bp, Artificial Sequence
  Description of Artificial Sequence: targeting sequence/synthetic sequence
accctcaccttccagcgcgccatgcacgactacaaccaggccgagatgaagcagcgcgac

SEQ ID NO: 3594 - DNA, 60 bp, Artificial Sequence
  Description of Artificial Sequence: targeting sequence/synthetic sequence
atcgaggaaagcctgaacaagatcacccagaacagcggcaacgacgtgcggaacttcgag

SEQ ID NO: 3595 - DNA, 60 bp, Artificial Sequence
  Description of Artificial Sequence: targeting sequence/synthetic sequence
gccaacacccagaacaataacatcgagggccaggccatcgtgtaccagagcaagttcctg

SEQ ID NO: 3596 - DNA, 60 bp, Artificial Sequence
  Description of Artificial Sequence: targeting sequence/synthetic sequence
cgggcccaccagaacagccagacccaccaggccagcctgagcaagcagcccaccagccag

SEQ ID NO: 3597 - DNA, 60 bp, Artificial Sequence
  Description of Artificial Sequence: targeting sequence/synthetic sequence
ggcttcaacatcgccagcaagaacctgaagaccgagttcaacggccagaacaaggccgtg

SEQ ID NO: 3598 - DNA, 60 bp, Artificial Sequence
  Description of Artificial Sequence: targeting sequence/synthetic sequence
ctggtgtcagagttcaccaattcaaataaccatttggctgctgattcgcaggcttatgat

SEQ ID NO: 3599 - DNA, 60 bp, Artificial Sequence
  Description of Artificial Sequence: targeting sequence/synthetic sequence
ctgatccgggacaagcggttccactacgaccggaacaatatcgccgtgggcgccgacgag

SEQ ID NO: 3600 - DNA, 60 bp, Artificial Sequence
  Description of Artificial Sequence: targeting sequence/synthetic sequence
aaggagcggatgtacaacgccctgaacaatcagagccaggccatcgagaagatcattgag

SEQ ID NO: 3601 - DNA, 60 bp, Artificial Sequence
  Description of Artificial Sequence: targeting sequence/synthetic sequence
gcaactcaggggaaagaacattcagaaatgtctaacaatgtgagtgatccgaagggtcca

SEQ ID NO: 3602 - DNA, 60 bp, Artificial Sequence
  Description of Artificial Sequence: targeting sequence/synthetic sequence
atcggcctggccctgaacatcggcaacgaggcccagaagggcaacttcaaggacgccctg

SEQ ID NO: 3603 - DNA, 60 bp, Artificial Sequence
  Description of Artificial Sequence: targeting sequence/synthetic sequence
aaccggtacaagatcctgaacaatagcctgaaccccgccatcagcgaggacaacgacttc

SEQ ID NO: 3604 - DNA, 60 bp, Artificial Sequence
  Description of Artificial Sequence: targeting sequence/synthetic sequence
ctccttcggaatggtgtgagtgaggagaacctggccaagctgatccagcatgccaatgta

SEQ ID NO: 3605 - DNA, 60 bp, Artificial Sequence
  Description of Artificial Sequence: targeting sequence/synthetic sequence
ctggacggcaagcagaacaccgtgcccctggagaccgtgaagaccaacaagaaaaacgtg

SEQ ID NO: 3606 - DNA, 60 bp, Artificial Sequence
  Description of Artificial Sequence: targeting sequence/synthetic sequence
agcctgaacgtgatccggagcgccatcggcacccccctgcagaccatcagctccggcgga

SEQ ID NO: 3607 - DNA, 60 bp, Artificial Sequence
  Description of Artificial Sequence: targeting sequence/synthetic sequence
accgccgctctgatcattggcaacctggtgaccgccaacgccgagagcaacaagcagaac

SEQ ID NO: 3608 - DNA, 60 bp, Artificial Sequence
  Description of Artificial Sequence: targeting sequence/synthetic sequence
gccatcgagctgtacaacaataacacccacgacctggtgggcgacgtgaagctggccggc

SEQ ID NO: 3609 - DNA, 60 bp, Artificial Sequence
  Description of Artificial Sequence: targeting sequence/synthetic sequence
ttccccaacgccgtgaccctgcggagcgtgaacaatcagcccgtgatcgtggacagcctg

SEQ ID NO: 3610 - DNA, 60 bp, Artificial Sequence
  Description of Artificial Sequence: targeting sequence/synthetic sequence
ggcacccacaacggccagatcggcaacgaccccaaccgggacatcctgatcgccagcaac

SEQ ID NO: 3611 - DNA, 60 bp, Artificial Sequence
  Description of Artificial Sequence: targeting sequence/synthetic sequence
ctgagccggggcgtgcaggagagcgtgcaggacaccttccccaaccaggtgaccctgacc

SEQ ID NO: 3612 - DNA, 60 bp, Artificial Sequence
  Description of Artificial Sequence: targeting sequence/synthetic sequence
gccgccttcaacgctcagaacaacggctccaattttcagctggaggaaatttcccgggct

SEQ ID NO: 3613 - DNA, 60 bp, Artificial Sequence
  Description of Artificial Sequence: targeting sequence/synthetic sequence
ctgtcttctaagagccttgttctgggacagaagctgtccttaacccagagtgacatcagc

SEQ ID NO: 3614 - DNA, 60 bp, Artificial Sequence
  Description of Artificial Sequence: targeting sequence/synthetic sequence
aagccccctctgcccagcgtgcagaagctggtggaggaccggtggaacaagccccaggag

SEQ ID NO: 3615 - DNA, 60 bp, Artificial Sequence
  Description of Artificial Sequence: targeting sequence/synthetic sequence
ggcggagacatcagcatcagcaacggcctgagcggcggactgaacggcaacaccgccttc

SEQ ID NO: 3616 - DNA, 60 bp, Artificial Sequence
  Description of Artificial Sequence: targeting sequence/synthetic sequence
cggccccctctgcccagcgtgaccaagctgaccgaggaccggtggaacgagcggcagaag

SEQ ID NO: 3617 - DNA, 60 bp, Artificial Sequence
  Description of Artificial Sequence: targeting sequence/synthetic sequence
tgggtgagcctgagcgacaacgacaccttcgccgctagcgagcacggcaagcggcagaac

SEQ ID NO: 3618 - DNA, 60 bp, Artificial Sequence
  Description of Artificial Sequence: targeting sequence/synthetic sequence
agtaaattccagttttccagcaacaaggaacagaacggagtacaagatcctcagcatgag

SEQ ID NO: 3619 - DNA, 60 bp, Artificial Sequence
  Description of Artificial Sequence: targeting sequence/synthetic sequence
ttcgacaccaacagcaacagcgtgagcttcaacctgctcgagcaggaccccagcggcgcc

SEQ ID NO: 3620 - DNA, 60 bp, Artificial Sequence
  Description of Artificial Sequence: targeting sequence/synthetic sequence
cgctcttcctccagcccctacgtgtccaatgctgtgcagagggacgcgccgctcgaatac

SEQ ID NO: 3621 - DNA, 60 bp, Artificial Sequence
  Description of Artificial Sequence: targeting sequence/synthetic sequence
actaaagcccggaatgaaggtagaatcagagacagtgttgatctgcaatcattgatgact

SEQ ID NO: 3622 - DNA, 60 bp, Artificial Sequence
  Description of Artificial Sequence: targeting sequence/synthetic sequence
gaggtgcggaacgccctgaaccggagagcccacgccgtgggcgcccaggacgtggtccag

SEQ ID NO: 3623 - DNA, 60 bp, Artificial Sequence
  Description of Artificial Sequence: targeting sequence/synthetic sequence
ttcgagtacttcgcccccgccaacacccacaacaataacatcgagggccaggccatcgtg

SEQ ID NO: 3624 - DNA, 60 bp, Artificial Sequence
  Description of Artificial Sequence: targeting sequence/synthetic sequence
ctactgcggggtgacacggatgtcagggtagagaggaaagacccaaaccaggtggaactg

SEQ ID NO: 3625 - DNA, 60 bp, Artificial Sequence
  Description of Artificial Sequence: targeting sequence/synthetic sequence
tacagtaagcatgacatgaacaaagttctggacctggagttgaaaggtgacattgagaaa

SEQ ID NO: 3626 - DNA, 60 bp, Artificial Sequence
  Description of Artificial Sequence: targeting sequence/synthetic sequence
atcgagcagatcgagaacgagctgaaccagaaggtgagcatcgccatgaacaatatcgac

SEQ ID NO: 3627 - DNA, 60 bp, Artificial Sequence
  Description of Artificial Sequence: targeting sequence/synthetic sequence
cctgctggaccaaatggcatcccaggagaaaagggtcctgctggagagcgtggtgctcca

SEQ ID NO: 3628 - DNA, 60 bp, Artificial Sequence
  Description of Artificial Sequence: targeting sequence/synthetic sequence
gaaaggggtgcccctgggttccgaggacctgctggaccaaatggcatcccaggagaaaag

SEQ ID NO: 3629 - DNA, 60 bp, Artificial Sequence
  Description of Artificial Sequence: targeting sequence/synthetic sequence
ctcgccatcggagacggcgccaacgatgtcgggatgatccagacagcccacgtgggtgtg

SEQ ID NO: 3630 - DNA, 60 bp, Artificial Sequence
  Description of Artificial Sequence: targeting sequence/synthetic sequence
tacagcagcagccccagagtcctaagcaacaacagtgacgccaacttggagctcatcaac

SEQ ID NO: 3631 - DNA, 60 bp, Artificial Sequence
  Description of Artificial Sequence: targeting sequence/synthetic sequence
agcctgagcgacaacgacaccttcgccgctagcgagcacggcaagcggcagaactacccc

SEQ ID NO: 3632 - DNA, 60 bp, Artificial Sequence
  Description of Artificial Sequence: targeting sequence/synthetic sequence
atcaagaccatcattgagagcaagtacaacagctacaccctggaggaaaagaacgagctg

SEQ ID NO: 3633 - DNA, 60 bp, Artificial Sequence
  Description of Artificial Sequence: targeting sequence/synthetic sequence
gtggacgaggtgctgaacgaggtgctggtggtccccaacatcaaccagagccaccccacc

SEQ ID NO: 3634 - DNA, 60 bp, Artificial Sequence
  Description of Artificial Sequence: targeting sequence/synthetic sequence
gggaaacgttacaatgacagtgactcaagttctggaccatccattaaagacaaatacgtc

SEQ ID NO: 3635 - DNA, 60 bp, Artificial Sequence
  Description of Artificial Sequence: targeting sequence/synthetic sequence
ggcgacaagaactacctgatcagcaacctgagcaacaccatcgagaagatcaacaccctg

SEQ ID NO: 3636 - DNA, 60 bp, Artificial Sequence
  Description of Artificial Sequence: targeting sequence/synthetic sequence
atgttcaacgtgaacgacgtgctgggcgcctacagcccccaccccgacgagcaggaggtg

SEQ ID NO: 3637 - DNA, 60 bp, Artificial Sequence
  Description of Artificial Sequence: targeting sequence/synthetic sequence
aacaatcggctgccctacgtggccgacaaggacagcatcagccaggagatcttcgagaac

SEQ ID NO: 3638 - DNA, 60 bp, Artificial Sequence
  Description of Artificial Sequence: targeting sequence/synthetic sequence
ggaagcaagaaggagcctggaggaggcgcggcgactgaggagggcgtgaataggatcgca

SEQ ID NO: 3639 - DNA, 60 bp, Artificial Sequence
  Description of Artificial Sequence: targeting sequence/synthetic sequence
cagttcggcatctacaacagccggctgagcgaggtgaacatcgcccagaacaatgacatc

SEQ ID NO: 3640 - DNA, 60 bp, Artificial Sequence
  Description of Artificial Sequence: targeting sequence/synthetic sequence
ggctcagagagaagtggacagcagattgttggccctcccaggaagaaaagtcccaacgag

SEQ ID NO: 3641 - DNA, 60 bp, Artificial Sequence
  Description of Artificial Sequence: targeting sequence/synthetic sequence
aacaccatctacacccagaacgagggcttcaacatcgccagcaagaacctgaagaccgag

SEQ ID NO: 3642 - DNA, 60 bp, Artificial Sequence
  Description of Artificial Sequence: targeting sequence/synthetic sequence
ttcctgaacaatctgaagcagctgcccctgctcgagaaccaggtgagcaacctggagcag

SEQ ID NO: 3643 - DNA, 60 bp, Artificial Sequence
  Description of Artificial Sequence: targeting sequence/synthetic sequence
cacataactgggaccagaggaagaagcaacacattgtcttctccaaactccaagaatgaa

SEQ ID NO: 3644 - DNA, 60 bp, Artificial Sequence
  Description of Artificial Sequence: targeting sequence/synthetic sequence
accagaggaagaagcaacacattgtcttctccaaactccaagaatgaaaaggctctgggc

SEQ ID NO: 3645 - DNA, 60 bp, Artificial Sequence
  Description of Artificial Sequence: targeting sequence/synthetic sequence
gactgtgttgctaaagaggccacagaggcagccaagtgtaacctgctggcagaaaagcaa

SEQ ID NO: 3646 - DNA, 60 bp, Artificial Sequence
  Description of Artificial Sequence: targeting sequence/synthetic sequence
atcgccagcaagaacctgaagaccgagttcaacggccagaacaaggccgtgaacaaggag

SEQ ID NO: 3647 - DNA, 60 bp, Artificial Sequence
  Description of Artificial Sequence: targeting sequence/synthetic sequence
atcaccaagctgaagcagctgggcatcctggagaaccagatcaacaccatccaccagagc

SEQ ID NO: 3648 - DNA, 60 bp, Artificial Sequence
  Description of Artificial Sequence: targeting sequence/synthetic sequence
aaaggcaaagaccttgtcgcccgagaatcccttctggatggcggaaataaagtagtcata

SEQ ID NO: 3649 - DNA, 60 bp, Artificial Sequence
  Description of Artificial Sequence: targeting sequence/synthetic sequence
cagatcctgaaccccaacgagaccggcaccttcagccagagcctgaccaagagcaaggag

SEQ ID NO: 3650 - DNA, 60 bp, Artificial Sequence
  Description of Artificial Sequence: targeting sequence/synthetic sequence
gcccggggtcctccaggaccagccggtgctaatggtgctcctggactgcgaggtggtgca

SEQ ID NO: 3651 - DNA, 60 bp, Artificial Sequence
  Description of Artificial Sequence: targeting sequence/synthetic sequence
atcaccagcttccccgagggctacaacacggtcgtcggtgaacggggcactaccctgtct

SEQ ID NO: 3652 - DNA, 60 bp, Artificial Sequence
  Description of Artificial Sequence: targeting sequence/synthetic sequence
aagcagacctacagcaagtttgacacaaactcgcacaaccatgacgcactgctcaagaac

SEQ ID NO: 3653 - DNA, 60 bp, Artificial Sequence
  Description of Artificial Sequence: targeting sequence/synthetic sequence
ccccctgacaagttcgccgctaacgtggccaacgtgagcatcaacaagaaaatcattcag

SEQ ID NO: 3654 - DNA, 60 bp, Artificial Sequence
  Description of Artificial Sequence: targeting sequence/synthetic sequence
cggctggctgcccggccctactcggcgacggcggctgcggctactggaggcatggctaat

SEQ ID NO: 3655 - DNA, 60 bp, Artificial Sequence
  Description of Artificial Sequence: targeting sequence/synthetic sequence
accaagtacagtaagcatgacatgaacaaagttctggacctggagttgaaaggtgacatt

SEQ ID NO: 3656 - DNA, 60 bp, Artificial Sequence
  Description of Artificial Sequence: targeting sequence/synthetic sequence
tccagtgggcagggtcagcaggcccaaacccccacaggcaagcaaactgacaaaaccaag

SEQ ID NO: 3657 - DNA, 60 bp, Artificial Sequence
  Description of Artificial Sequence: targeting sequence/synthetic sequence
gatataaataaacctggacccctttttaagccggaaaatggattgctggaaaccaaagta

SEQ ID NO: 3658 - DNA, 60 bp, Artificial Sequence
  Description of Artificial Sequence: targeting sequence/synthetic sequence
gtgcgggccggcaccgagagcgagcagagcctgcagaagatcattgacgatcgggccaag

SEQ ID NO: 3659 - DNA, 60 bp, Artificial Sequence
  Description of Artificial Sequence: targeting sequence/synthetic sequence
ggtatgggtaatgaagttgatgtgcacgcagctttctttcacgggcaagcactgactaac

SEQ ID NO: 3660 - DNA, 60 bp, Artificial Sequence
  Description of Artificial Sequence: targeting sequence/synthetic sequence
gacgagatccggaaggtgatcaaggacaacgccaccttcagcaccaagaaccccgcctac

SEQ ID NO: 3661 - DNA, 60 bp, Artificial Sequence
  Description of Artificial Sequence: targeting sequence/synthetic sequence
ggcgagagccgggacctgcccagcggccagggcatcaacaatctggacaacctgcgggac

SEQ ID NO: 3662 - DNA, 60 bp, Artificial Sequence
  Description of Artificial Sequence: targeting sequence/synthetic sequence
ctggccttcacacaggagaccatcgaccgcttggcgggtaaacccacccatgtcaatgtg

SEQ ID NO: 3663 - DNA, 60 bp, Artificial Sequence
  Description of Artificial Sequence: targeting sequence/synthetic sequence
ttcctgaaccagcacctgaaccccgccatcgagagcgacaacaatttcaccgacaccaca

SEQ ID NO: 3664 - DNA, 60 bp, Artificial Sequence
  Description of Artificial Sequence: targeting sequence/synthetic sequence
acactcaagtccctcaacaaccagattgagagcatccgcagccccgagggctcccgcaag

SEQ ID NO: 3665 - DNA, 60 bp, Artificial Sequence
  Description of Artificial Sequence: targeting sequence/synthetic sequence
ggcggagtgaccctgcacgacaacaatcggctgaccgaggaaaagaaagtgcccatcaac

SEQ ID NO: 3666 - DNA, 60 bp, Artificial Sequence
  Description of Artificial Sequence: targeting sequence/synthetic sequence
ctgacactgaccaaggcgcctgtggacctgctcggtgttgcccacaacaacctcatggca

SEQ ID NO: 3667 - DNA, 60 bp, Artificial Sequence
  Description of Artificial Sequence: targeting sequence/synthetic sequence
aagaaggtggccgacgcgctgaccaacgccgtggcgcacgtggacgacatgcccaacgcg

SEQ ID NO: 3668 - DNA, 60 bp, Artificial Sequence
  Description of Artificial Sequence: targeting sequence/synthetic sequence
agcggcatcagctccctgagctacaaccggaacgaggtgctggccagcaacggcgacaag

SEQ ID NO: 3669 - DNA, 60 bp, Artificial Sequence
  Description of Artificial Sequence: targeting sequence/synthetic sequence
aacttcaacttcaacggcctgaccggcaccggcgtgctgaccgagagcaacaagaaattc

SEQ ID NO: 3670 - DNA, 60 bp, Artificial Sequence
  Description of Artificial Sequence: targeting sequence/synthetic sequence
tccaataactcagaaccatccagaatgaacatgacttctttagatgcaatggatatttcg

SEQ ID NO: 3671 - DNA, 60 bp, Artificial Sequence
  Description of Artificial Sequence: targeting sequence/synthetic sequence
gttaaaaaagcagacatgatcaacaaaaatatgactcatcaggtccaagctgagagagat

SEQ ID NO: 3672 - DNA, 60 bp, Artificial Sequence
  Description of Artificial Sequence: targeting sequence/synthetic sequence
aagcgggtgaaggccatcaccctcgccatcggagacggcgccaacgatgtcgggatgatc

SEQ ID NO: 3673 - DNA, 60 bp, Artificial Sequence
  Description of Artificial Sequence: targeting sequence/synthetic sequence
catgacagagcaacaccccagctgccagcacagctgcaggagcttgagcatcgggtggcc

SEQ ID NO: 3674 - DNA, 60 bp, Artificial Sequence
  Description of Artificial Sequence: targeting sequence/synthetic sequence
cagagaagtgtcccaggacatgataataagatgcaatttgaatcttcatcatacgaagga

SEQ ID NO: 3675 - DNA, 60 bp, Artificial Sequence
  Description of Artificial Sequence: targeting sequence/synthetic sequence
accaacagcaacagcgtgagcttcaacctgctcgagcaggaccccagcggcgccaccaca

SEQ ID NO: 3676 - DNA, 60 bp, Artificial Sequence
  Description of Artificial Sequence: targeting sequence/synthetic sequence
tcaggagcagtttcaaaagcagtcccagatcgcaatgcaactactttgggattgcctaac

SEQ ID NO: 3677 - DNA, 60 bp, Artificial Sequence
  Description of Artificial Sequence: targeting sequence/synthetic sequence
cggctgatgaaggacacccagaccatcagccagaccgtggccctgaccgagggcctgggc

SEQ ID NO: 3678 - DNA, 60 bp, Artificial Sequence
  Description of Artificial Sequence: targeting sequence/synthetic sequence
gtggactactatgacaacgtgcggaacgtggagaacgtgatcggcaccagcatgaaggac

SEQ ID NO: 3679 - DNA, 60 bp, Artificial Sequence
  Description of Artificial Sequence: targeting sequence/synthetic sequence
caggccctgcagaaccaggtgaacgccatcaagaccatcattgagagcaagtacaacagc

SEQ ID NO: 3680 - DNA, 60 bp, Artificial Sequence
  Description of Artificial Sequence: targeting sequence/synthetic sequence
ccagtgaagcgatcatctcagtccacattggaacgatctgaacagcagatcagggctgct

SEQ ID NO: 3681 - DNA, 60 bp, Artificial Sequence
  Description of Artificial Sequence: targeting sequence/synthetic sequence
cagctggtgacgaactgcacccagcggctggagcagggtccctgcaaagaccttttccag

SEQ ID NO: 3682 - DNA, 60 bp, Artificial Sequence
  Description of Artificial Sequence: targeting sequence/synthetic sequence
agtgggcaggtcctgggggaccagacggtctcagacaatgagctccaggaaatgtccaat

SEQ ID NO: 3683 - DNA, 60 bp, Artificial Sequence
  Description of Artificial Sequence: targeting sequence/synthetic sequence
gccaacgccagccggatccactacgacggcggagccggcaccaacaccgtgagctacgcc

SEQ ID NO: 3684 - DNA, 60 bp, Artificial Sequence
  Description of Artificial Sequence: targeting sequence/synthetic sequence
accccatctcgaatgatccgcacaaatgaagcagttccgaagacagcacccaccaatgta

SEQ ID NO: 3685 - DNA, 60 bp, Artificial Sequence
  Description of Artificial Sequence: targeting sequence/synthetic sequence
tcactcaagtctgttaatggacaaatagaaagcctcattagtcctgatggttctcgtaaa

SEQ ID NO: 3686 - DNA, 60 bp, Artificial Sequence
  Description of Artificial Sequence: targeting sequence/synthetic sequence
cccagcttcggctactatagcaacaatctgaaggacgtgaaggtgatcaccaaggacaac

SEQ ID NO: 3687 - DNA, 60 bp, Artificial Sequence
  Description of Artificial Sequence: targeting sequence/synthetic sequence
aagaggctctccaaagaggtccagaatgccctggccagagcgagcaacacggcggaggag

SEQ ID NO: 3688 - DNA, 60 bp, Artificial Sequence
  Description of Artificial Sequence: targeting sequence/synthetic sequence
atcctgaaggaaaattacgggcagaaggaggctgagaaagtggcccgggtgaaggcgcta

SEQ ID NO: 3689 - DNA, 60 bp, Artificial Sequence
  Description of Artificial Sequence: targeting sequence/synthetic sequence
ctgatgggcagcgccgagatcaccggcctgggcgccatccgggaggacaacaatatcacc

SEQ ID NO: 3690 - DNA, 60 bp, Artificial Sequence
  Description of Artificial Sequence: targeting sequence/synthetic sequence
tacttcgcccccgccaacacccagaacaataacatcgagggccaggccatcgtgtaccag

SEQ ID NO: 3691 - DNA, 60 bp, Artificial Sequence
  Description of Artificial Sequence: targeting sequence/synthetic sequence
atcgcccgggccgacaacgacgtgaacagctccctggcccacggccacaccgccgtggac

SEQ ID NO: 3692 - DNA, 60 bp, Artificial Sequence
  Description of Artificial Sequence: targeting sequence/synthetic sequence
aagtacggcctggacaagaacgccgacggcagctacaccgtgaacgagaacaagttcaac

SEQ ID NO: 3693 - DNA, 60 bp, Artificial Sequence
  Description of Artificial Sequence: targeting sequence/synthetic sequence
cctccggggcctgaggtctccagggactccaacaccctccagagagaatcactggccaac

SEQ ID NO: 3694 - DNA, 60 bp, Artificial Sequence
  Description of Artificial Sequence: targeting sequence/synthetic sequence
gaccacctcaactcaaccaaccatgccattgtgcagaccctggtcaattctgtcaattcc

SEQ ID NO: 3695 - DNA, 60 bp, Artificial Sequence
  Description of Artificial Sequence: targeting sequence/synthetic sequence
gccgtggcgcacgtggacgacatgcccaacgcgctgtccgccctgagcgacctgcacgcg

SEQ ID NO: 3696 - DNA, 60 bp, Artificial Sequence
  Description of Artificial Sequence: targeting sequence/synthetic sequence
gtgagctacgacaaggagggcaacgaggtgctgacccacaagacctgggacggcaactac

SEQ ID NO: 3697 - DNA, 60 bp, Artificial Sequence
  Description of Artificial Sequence: targeting sequence/synthetic sequence
tacaagggcaacatcattgccgaggccatcgagaagctggaccgggagggccagaagttc

SEQ ID NO: 3698 - DNA, 60 bp, Artificial Sequence
  Description of Artificial Sequence: targeting sequence/synthetic sequence
gagctggaggtgcggaacgccctgaaccggagagcccacgccgtgggcgcccaggacgtg

SEQ ID NO: 3699 - DNA, 60 bp, Artificial Sequence
  Description of Artificial Sequence: targeting sequence/synthetic sequence
tttctggaaaacgtgattcgtgatgctgtgacttacacggagcacgccaaacgcaagaca

SEQ ID NO: 3700 - DNA, 60 bp, Artificial Sequence
  Description of Artificial Sequence: targeting sequence/synthetic sequence
ggcaatcagagaataaaggtttcaaataccttggaaagccgactggatctctcagccaag

SEQ ID NO: 3701 - DNA, 60 bp, Artificial Sequence
  Description of Artificial Sequence: targeting sequence/synthetic sequence
gaacatacatccaaaatcacaactggaggtgatgttattaataatggtctatggaatatg

SEQ ID NO: 3702 - DNA, 60 bp, Artificial Sequence
  Description of Artificial Sequence: targeting sequence/synthetic sequence
tcagagagaagtggacagcagattgttggccctcccaggaagaaaagtcccaacgagctg

SEQ ID NO: 3703 - DNA, 60 bp, Artificial Sequence
  Description of Artificial Sequence: targeting sequence/synthetic sequence
cggctgaacgaccggatcgccggcgacgatcaggacaacgagctgtggggccacgacggc

SEQ ID NO: 3704 - DNA, 60 bp, Artificial Sequence
  Description of Artificial Sequence: targeting sequence/synthetic sequence
gttaaaaaactcaatgaaatcagcaaactgggaatttctggtgacatagacctcaccagt

SEQ ID NO: 3705 - DNA, 60 bp, Artificial Sequence
  Description of Artificial Sequence: targeting sequence/synthetic sequence
cttgcagcgcctccaggaatcaacttggttgccccacccagctctcagctaaatgtggtc

SEQ ID NO: 3706 - DNA, 60 bp, Artificial Sequence
  Description of Artificial Sequence: targeting sequence/synthetic sequence
aaggccatcattgagagcaagtacaacagctacaccctggaggaaaagaacgagctgacc

SEQ ID NO: 3707 - DNA, 60 bp, Artificial Sequence
  Description of Artificial Sequence: targeting sequence/synthetic sequence
tacaacagccagaccatcccccagatcagcaaccggaccctgaacaccctggtgcaggac

SEQ ID NO: 3708 - DNA, 60 bp, Artificial Sequence
  Description of Artificial Sequence: targeting sequence/synthetic sequence
cgcctcatgaacctgcataacaatgaggccggcaggaaggttctagaggaccggatgcag

SEQ ID NO: 3709 - DNA, 60 bp, Artificial Sequence
  Description of Artificial Sequence: targeting sequence/synthetic sequence
accctgcacgacaacaatcggctgaccgaggaaaagaaagtgcccatcaacctgtggctg

SEQ ID NO: 3710 - DNA, 60 bp, Artificial Sequence
  Description of Artificial Sequence: targeting sequence/synthetic sequence
cctggtggaaatgagattactcgaggaggctccacctcttatggaaccggatcagagacg

SEQ ID NO: 3711 - DNA, 60 bp, Artificial Sequence
  Description of Artificial Sequence: targeting sequence/synthetic sequence
ctgaaactgcgctatgactcggctgtcaaggtgtccagtgccaccaatgaggccttgggc

SEQ ID NO: 3712 - DNA, 60 bp, Artificial Sequence
  Description of Artificial Sequence: targeting sequence/synthetic sequence
agcaccaaccagctgcggagcgtgggcctgaacctggagggcaacggcgtggccaccgac

SEQ ID NO: 3713 - DNA, 60 bp, Artificial Sequence
  Description of Artificial Sequence: targeting sequence/synthetic sequence
ggagccaaaggtgctcgcggcagcgctggtccccctggtgctactggtttccctggtgct

SEQ ID NO: 3714 - DNA, 60 bp, Artificial Sequence
  Description of Artificial Sequence: targeting sequence/synthetic sequence
aaggagcagatgtaccaggccctgcagaaccaggtgaacgccatcaagaccatcattgag

SEQ ID NO: 3715 - DNA, 60 bp, Artificial Sequence
  Description of Artificial Sequence: targeting sequence/synthetic sequence
agactacaacaggcccaaaaagggacccccatgaaaccgaacacacaagccacgcctccc

SEQ ID NO: 3716 - DNA, 60 bp, Artificial Sequence
  Description of Artificial Sequence: targeting sequence/synthetic sequence
gacatgctggagaaccagatcgccaccatccaccagagctgccccagccaggagcagcaa

SEQ ID NO: 3717 - DNA, 60 bp, Artificial Sequence
  Description of Artificial Sequence: targeting sequence/synthetic sequence
ttcgacaacaatagcaaggccgtgaccggcctgcagaccatcgacagcaagaaatactat

SEQ ID NO: 3718 - DNA, 60 bp, Artificial Sequence
  Description of Artificial Sequence: targeting sequence/synthetic sequence
aacgtgtggatcattcccgagcggaacaccatcggcaccaaccccagcgacttcgacccc

SEQ ID NO: 3719 - DNA, 60 bp, Artificial Sequence
  Description of Artificial Sequence: targeting sequence/synthetic sequence
gacaatgacatcgcactgctgcacctggcccagcccgccaccctctcgcagaccatagtg

SEQ ID NO: 3720 - DNA, 60 bp, Artificial Sequence
  Description of Artificial Sequence: targeting sequence/synthetic sequence
aagtaccagttcgacaaggacagcaacggccagtacatcgtgaacgaggacaagttccag

SEQ ID NO: 3721 - DNA, 60 bp, Artificial Sequence
  Description of Artificial Sequence: targeting sequence/synthetic sequence
gtcaaggctccagggtttggtgacaatagaaagaaccagcttaaagatatggctattgct

SEQ ID NO: 3722 - DNA, 60 bp, Artificial Sequence
  Description of Artificial Sequence: targeting sequence/synthetic sequence
aacgccagcaccccccctgacaagttcgccgctaacgtggccaacgtgagcatcaacaag

SEQ ID NO: 3723 - DNA, 60 bp, Artificial Sequence
  Description of Artificial Sequence: targeting sequence/synthetic sequence
cccgacaagttcgccgctaacgtggccaacgtgagcatcaacaagaaaatcattcagccc

SEQ ID NO: 3724 - DNA, 60 bp, Artificial Sequence
  Description of Artificial Sequence: targeting sequence/synthetic sequence
cgggtgaaggccatcaccctcgccatcggagacggcgccaacgatgtcgggatgatccag

SEQ ID NO: 3725 - DNA, 60 bp, Artificial Sequence
  Description of Artificial Sequence: targeting sequence/synthetic sequence
atagcagatttgggcctggcagtcatgcattcccagagcaccaatcagcttgatgtgggg

SEQ ID NO: 3726 - DNA, 60 bp, Artificial Sequence
  Description of Artificial Sequence: targeting sequence/synthetic sequence
tggggcgccaagtacaacgtgagcatcagctcccagagcaacgacagcgtgaacgccgtg

SEQ ID NO: 3727 - DNA, 60 bp, Artificial Sequence
  Description of Artificial Sequence: targeting sequence/synthetic sequence
actgatggggactccaacaactacattaatgcagccctgactgacagctacacacggagt

SEQ ID NO: 3728 - DNA, 60 bp, Artificial Sequence
  Description of Artificial Sequence: targeting sequence/synthetic sequence
ccccagaaggagtgggacaaggtggtcaacacccccaacagcctggagaagcagaagggc

SEQ ID NO: 3729 - DNA, 60 bp, Artificial Sequence
  Description of Artificial Sequence: targeting sequence/synthetic sequence
atcctggtaaatgaaccatactacaacgaagccggcttcgacagtgaccgaggcctgcag

SEQ ID NO: 3730 - DNA, 60 bp, Artificial Sequence
  Description of Artificial Sequence: targeting sequence/synthetic sequence
ggtgcccctgggttccgaggacctgctggaccaaatggcatcccaggagaaaagggtcct

SEQ ID NO: 3731 - DNA, 60 bp, Artificial Sequence
  Description of Artificial Sequence: targeting sequence/synthetic sequence
ctgcaattagaacggctacatctagaaggcaacaaattgcaagtactgggaaaagatctc

SEQ ID NO: 3732 - DNA, 60 bp, Artificial Sequence
  Description of Artificial Sequence: targeting sequence/synthetic sequence
aacatcaagagccaggtggagaacctgaagaacagcctggacgtgaagatcagcgaggcc

SEQ ID NO: 3733 - DNA, 60 bp, Artificial Sequence
  Description of Artificial Sequence: targeting sequence/synthetic sequence
caatgggtcaaggacgcgatgcagcatctggaccgccaggctgctgccctaactcgaaat

SEQ ID NO: 3734 - DNA, 60 bp, Artificial Sequence
  Description of Artificial Sequence: targeting sequence/synthetic sequence
gtgaacgacgtgctgtacgccggccacaacagcacctgggacccccagagcaacagcatc

SEQ ID NO: 3735 - DNA, 60 bp, Artificial Sequence
  Description of Artificial Sequence: targeting sequence/synthetic sequence
tcgtccgcaacctcctcgaacgcgggagcggaccccaataccactaacctgcgccccaca

SEQ ID NO: 3736 - DNA, 60 bp, Artificial Sequence
  Description of Artificial Sequence: targeting sequence/synthetic sequence
cgggccggcaccgagagcgagcagagcctgcagaagatcattgacgatcgggccaagagc

SEQ ID NO: 3737 - DNA, 60 bp, Artificial Sequence
  Description of Artificial Sequence: targeting sequence/synthetic sequence
tgggtcaaggacgcgatgcagcatctggaccgccaggctgctgccctaactcgaaatggc

SEQ ID NO: 3738 - DNA, 60 bp, Artificial Sequence
  Description of Artificial Sequence: targeting sequence/synthetic sequence
agcctggtgctgggcaagaaccagaccctggccaccatcaaggccaaggagaaccagctg

SEQ ID NO: 3739 - DNA, 60 bp, Artificial Sequence
  Description of Artificial Sequence: targeting sequence/synthetic sequence
acccacaacggccagatcggcaacgaccccaaccgggacatcctgatcgccagcaactgg

SEQ ID NO: 3740 - DNA, 60 bp, Artificial Sequence
  Description of Artificial Sequence: targeting sequence/synthetic sequence
accgccggcatcgccctgcaccagagcatgctgaacagccaggccatcgacaacctgcgg

SEQ ID NO: 3741 - DNA, 60 bp, Artificial Sequence
  Description of Artificial Sequence: targeting sequence/synthetic sequence
catgaaaacggtattatacaccgtgacttaaagccagagaatgttttactgtcatctcaa

SEQ ID NO: 3742 - DNA, 60 bp, Artificial Sequence
  Description of Artificial Sequence: targeting sequence/synthetic sequence
ggtaatgaagttgatgtgcacgcagctttctttcacgggcaagcactgactaacaagaac

SEQ ID NO: 3743 - DNA, 60 bp, Artificial Sequence
  Description of Artificial Sequence: targeting sequence/synthetic sequence
gacaagaccctggccaacaagctgagcttcaacttcagcgacaagcaggacgtgcccgtg

SEQ ID NO: 3744 - DNA, 60 bp, Artificial Sequence
  Description of Artificial Sequence: targeting sequence/synthetic sequence
cactccctctcgacaaacaaattggaaaaacagattttggaccagaccagtgaaataaac

SEQ ID NO: 3745 - DNA, 60 bp, Artificial Sequence
  Description of Artificial Sequence: targeting sequence/synthetic sequence
tttgaatttccccaggaggaatttgatggcaaccagttccagaaagctcaagccatctct

SEQ ID NO: 3746 - DNA, 60 bp, Artificial Sequence
  Description of Artificial Sequence: targeting sequence/synthetic sequence
gcacttgcagcgcctccaggaatcaacttggttgccccacccagctctcagctaaatgtg

SEQ ID NO: 3747 - DNA, 60 bp, Artificial Sequence
  Description of Artificial Sequence: targeting sequence/synthetic sequence
ttcaccctcctgcgcacccttgaccttggggagaaccagttggagaccttgccacctgac

SEQ ID NO: 3748 - DNA, 60 bp, Artificial Sequence
  Description of Artificial Sequence: targeting sequence/synthetic sequence
gacagaaagggaggcaacagcagcgtgaagttggaggctggcctggccaacaccatcacc

SEQ ID NO: 3749 - DNA, 60 bp, Artificial Sequence
  Description of Artificial Sequence: targeting sequence/synthetic sequence
tccgatcaacaatctcatctggaatttagagtcaacagaaacaatctggagttgtcgaca

SEQ ID NO: 3750 - DNA, 60 bp, Artificial Sequence
  Description of Artificial Sequence: targeting sequence/synthetic sequence
ccccaggtgtacaccctgccccctagccgggacgagctgaccaagaaccaggtgagcctg

SEQ ID NO: 3751 - DNA, 60 bp, Artificial Sequence
  Description of Artificial Sequence: targeting sequence/synthetic sequence
atccgggacaagcggttccactacgaccggaacaatatcgccgtgggcgccgacgagagc

SEQ ID NO: 3752 - DNA, 60 bp, Artificial Sequence
  Description of Artificial Sequence: targeting sequence/synthetic sequence
ccacaggtgtacaccctgcccccatcccgggaggagatgaccaagaaccaggtcagcctg

SEQ ID NO: 3753 - DNA, 60 bp, Artificial Sequence
  Description of Artificial Sequence: targeting sequence/synthetic sequence
gagagaagtggacagcagattgttggccctcccaggaagaaaagtcccaacgagctggtg

SEQ ID NO: 3754 - DNA, 60 bp, Artificial Sequence
  Description of Artificial Sequence: targeting sequence/synthetic sequence
cgagacatccgggacattcaggatgaaaaccagctgctggtggccgacgtgaagcggctg

SEQ ID NO: 3755 - DNA, 60 bp, Artificial Sequence
  Description of Artificial Sequence: targeting sequence/synthetic sequence
aagcggttccactacgaccggaacaatatcgccgtgggcgccgacgagagcgtggtcaag

SEQ ID NO: 3756 - DNA, 60 bp, Artificial Sequence
  Description of Artificial Sequence: targeting sequence/synthetic sequence
cctctggcccaggcagtcagatcatcttctcgaaccccgagtgacaagcctgtagcccat

SEQ ID NO: 3757 - DNA, 60 bp, Artificial Sequence
  Description of Artificial Sequence: targeting sequence/synthetic sequence
gccttcagcgccgctctgaagggcaccgacgtgaagaccaacggcaagtacagcgacatc

SEQ ID NO: 3758 - DNA, 60 bp, Artificial Sequence
  Description of Artificial Sequence: targeting sequence/synthetic sequence
cgcttctctgggctgtctgctgagctccggaaccagctggacgtggccaaggtctcccag

SEQ ID NO: 3759 - DNA, 60 bp, Artificial Sequence
  Description of Artificial Sequence: targeting sequence/synthetic sequence
cggaccttggaaatacctggcaactctgatcccaatatgatccctgatggggactttaac

SEQ ID NO: 3760 - DNA, 60 bp, Artificial Sequence
  Description of Artificial Sequence: targeting sequence/synthetic sequence
ctgcggggtgacacggatgtcagggtagagaggaaagacccaaaccaggtggaactgtgg

SEQ ID NO: 3761 - DNA, 60 bp, Artificial Sequence
  Description of Artificial Sequence: targeting sequence/synthetic sequence
gccgctctgatcattggcaacctggtgaccgccaacgccgagagcaacaagcagaacacc

SEQ ID NO: 3762 - DNA, 60 bp, Artificial Sequence
  Description of Artificial Sequence: targeting sequence/synthetic sequence
tcctcagccaataaccgtgataatacctacaaccgagtgtcagaggatctgagaagcaga

SEQ ID NO: 3763 - DNA, 60 bp, Artificial Sequence
  Description of Artificial Sequence: targeting sequence/synthetic sequence
cctggagccaaaggtgctcgcggcagcgctggtccccctggtgctactggtttccctggt

SEQ ID NO: 3764 - DNA, 60 bp, Artificial Sequence
  Description of Artificial Sequence: targeting sequence/synthetic sequence
cagaacatgcggctgcccaacctgctgggccacgagaccatgaaggaggtgctggagcag

SEQ ID NO: 3765 - DNA, 60 bp, Artificial Sequence
  Description of Artificial Sequence: targeting sequence/synthetic sequence
gggaaggtgaggagtgaggggaccaattccacgctgaccctgagccctgtgagttttgag

SEQ ID NO: 3766 - DNA, 60 bp, Artificial Sequence
  Description of Artificial Sequence: targeting sequence/synthetic sequence
ctcaactcaaccaaccatgccattgtgcagaccctggtcaattctgtcaattccagtatc

SEQ ID NO: 3767 - DNA, 60 bp, Artificial Sequence
  Description of Artificial Sequence: targeting sequence/synthetic sequence
aagaaggccctgctcatccagggctccaatgacgtggagatccgggcagagggcaatagc

SEQ ID NO: 3768 - DNA, 60 bp, Artificial Sequence
  Description of Artificial Sequence: targeting sequence/synthetic sequence
ctggcccaggcagtcagatcatcttctcgaaccccgagtgacaagcctgtagcccatgtt

SEQ ID NO: 3769 - DNA, 60 bp, Artificial Sequence
  Description of Artificial Sequence: targeting sequence/synthetic sequence
gccatcttcttcctgcctgatgaggggaaactacagcacctggaaaatgaactcacccac

SEQ ID NO: 3770 - DNA, 60 bp, Artificial Sequence
  Description of Artificial Sequence: targeting sequence/synthetic sequence
gagcagctgtgcatccatcctgaggtcaagaaacaagagagtaaccatctacagatccac

SEQ ID NO: 3771 - DNA, 60 bp, Artificial Sequence
  Description of Artificial Sequence: targeting sequence/synthetic sequence
ccaggtcgcccgggatttaatggcttacctgggaacccaggtgtgcagggccagaaggga

SEQ ID NO: 3772 - DNA, 60 bp, Artificial Sequence
  Description of Artificial Sequence: targeting sequence/synthetic sequence
agccccaccacactgcagcggatcaccatgaccaacagcgtggacgatgccctgatcaac

SEQ ID NO: 3773 - DNA, 60 bp, Artificial Sequence
  Description of Artificial Sequence: targeting sequence/synthetic sequence
gccaacgccaccaggattccagcaaaaaccccgcccgctccaaagacaccacccagctct

SEQ ID NO: 3774 - DNA, 60 bp, Artificial Sequence
  Description of Artificial Sequence: targeting sequence/synthetic sequence
ctcaacaagctgctgggcaaagtcaccatcgcacagggcggtgtcctgcccaacattcag

SEQ ID NO: 3775 - DNA, 60 bp, Artificial Sequence
  Description of Artificial Sequence: targeting sequence/synthetic sequence
gcccgagaatcccttctggatggcggaaataaagtagtcataagtggcttcggtgaccca

SEQ ID NO: 3776 - DNA, 60 bp, Artificial Sequence
  Description of Artificial Sequence: targeting sequence/synthetic sequence
ggccgcaaactgacacctcagggacaaagagatctggacagaatcgccggacaggtggca

SEQ ID NO: 3777 - DNA, 60 bp, Artificial Sequence
  Description of Artificial Sequence: targeting sequence/synthetic sequence
gccgccggcgtggcccacgccatcacagctgcctgtacccagggcaacctgagcgactgt

SEQ ID NO: 3778 - DNA, 60 bp, Artificial Sequence
  Description of Artificial Sequence: targeting sequence/synthetic sequence
atctccaaagccaaagggcagccccgagagccacaggtgtacaccctgcccccatcccag

SEQ ID NO: 3779 - DNA, 60 bp, Artificial Sequence
  Description of Artificial Sequence: targeting sequence/synthetic sequence
ctccatgggctggtggccgacagtaatctcacgctgggacctggcctgcagcccctgccc

SEQ ID NO: 3780 - DNA, 60 bp, Artificial Sequence
  Description of Artificial Sequence: targeting sequence/synthetic sequence
aacagtcatattaatgcatccaataactcagaaccatccagaatgaacatgacttcttta

SEQ ID NO: 3781 - DNA, 60 bp, Artificial Sequence
  Description of Artificial Sequence: targeting sequence/synthetic sequence
cgggtgagccagcccctgcggcccagccagctgaagcagcccaacggcgtgaacagccag

SEQ ID NO: 3782 - DNA, 60 bp, Artificial Sequence
  Description of Artificial Sequence: targeting sequence/synthetic sequence
cacagctatggtgggggggccaccaatgccaatgccagggcaaagggaggcaccgggcag

SEQ ID NO: 3783 - DNA, 60 bp, Artificial Sequence
  Description of Artificial Sequence: targeting sequence/synthetic sequence
cagcaaagccaccaggccggctacgccaacgccgctgaccgggagagcggcatccccgcc

SEQ ID NO: 3784 - DNA, 60 bp, Artificial Sequence
  Description of Artificial Sequence: targeting sequence/synthetic sequence
ggcgccaagtacaacgtgagcatcagctcccagagcaacgacagcgtgaacgccgtggac

SEQ ID NO: 3785 - DNA, 60 bp, Artificial Sequence
  Description of Artificial Sequence: targeting sequence/synthetic sequence
tatggtaactttttggctaatcacacaaatcctcttactgtttccaaaattgacactgag

SEQ ID NO: 3786 - DNA, 60 bp, Artificial Sequence
  Description of Artificial Sequence: targeting sequence/synthetic sequence
cccagcatccagaccggcagcgaggaaatccggagcctgtacaacaccgtggccaccctg

SEQ ID NO: 3787 - DNA, 60 bp, Artificial Sequence
  Description of Artificial Sequence: targeting sequence/synthetic sequence
tttccccaggaggagtttgatggcaaccagttccagaaggctgaagccatctctgtcctc

SEQ ID NO: 3788 - DNA, 60 bp, Artificial Sequence
  Description of Artificial Sequence: targeting sequence/synthetic sequence
ttctgggctgtgaaagacactatgcaagctcaggataacatcacgagtgcccggctgctg

SEQ ID NO: 3789 - DNA, 60 bp, Artificial Sequence
  Description of Artificial Sequence: targeting sequence/synthetic sequence
ttcctggaaaatgtaatccgcgatgctgtcacctacacggaacacgccaaacgcaagaca

SEQ ID NO: 3790 - DNA, 60 bp, Artificial Sequence
  Description of Artificial Sequence: targeting sequence/synthetic sequence
aagaccaagcagaccctggccagcgtgagctccggccccaagcacacccagagcgtgccc

SEQ ID NO: 3791 - DNA, 60 bp, Artificial Sequence
  Description of Artificial Sequence: targeting sequence/synthetic sequence
tacatcattcagcacggcagcatcctgggcgagagccagcaagagctgaacagcatggtg

SEQ ID NO: 3792 - DNA, 60 bp, Artificial Sequence
  Description of Artificial Sequence: targeting sequence/synthetic sequence
gcatccaataactcagaaccatccagaatgaacatgacttctttagatgcaatggatatt

SEQ ID NO: 3793 - DNA, 60 bp, Artificial Sequence
  Description of Artificial Sequence: targeting sequence/synthetic sequence
cttaaaatacgtcagggtttgagtcacactgctgacatgcaaacacgtgaagttctgatg

SEQ ID NO: 3794 - DNA, 60 bp, Artificial Sequence
  Description of Artificial Sequence: targeting sequence/synthetic sequence
ggcgtggacgatctgatcaccgaggtggcccagaacgccctggccctgagcctgcccaag

SEQ ID NO: 3795 - DNA, 60 bp, Artificial Sequence
  Description of Artificial Sequence: targeting sequence/synthetic sequence
gccaacttcaccctcctgcgcacccttgaccttggggagaaccagttggagaccttgcca

SEQ ID NO: 3796 - DNA, 60 bp, Artificial Sequence
  Description of Artificial Sequence: targeting sequence/synthetic sequence
agtcatattaatgcatccaataactcagaaccatccagaatgaacatgacttctttagat

SEQ ID NO: 3797 - DNA, 60 bp, Artificial Sequence
  Description of Artificial Sequence: targeting sequence/synthetic sequence
tcaagcctcctgggatccacatcagattcaaacctcaacaaatacagcaccattaacaag

SEQ ID NO: 3798 - DNA, 60 bp, Artificial Sequence
  Description of Artificial Sequence: targeting sequence/synthetic sequence
ggcctgcagcggagacggttcgtgcagaacgccctgaacggcaacggcgacagcaacaat

SEQ ID NO: 3799 - DNA, 60 bp, Artificial Sequence
  Description of Artificial Sequence: targeting sequence/synthetic sequence
atcgccctgcaccagagcatgctgaacagccaggccatcgacaacctgcgggccagcctg

SEQ ID NO: 3800 - DNA, 60 bp, Artificial Sequence
  Description of Artificial Sequence: targeting sequence/synthetic sequence
cgtgttgttgccggcaacagcattgggattggagaaccaagtgaaccatcagaattgtta

SEQ ID NO: 3801 - DNA, 60 bp, Artificial Sequence
  Description of Artificial Sequence: targeting sequence/synthetic sequence
gacaccctgaacgtcatcgagctcaacgtacaaaagacggtcgactacaccggccaggcc

SEQ ID NO: 3802 - DNA, 60 bp, Artificial Sequence
  Description of Artificial Sequence: targeting sequence/synthetic sequence
gacgtgttccacatcgtgaaaacactgcgtaacaacaaatccaacatggtggagaccctg

SEQ ID NO: 3803 - DNA, 60 bp, Artificial Sequence
  Description of Artificial Sequence: targeting sequence/synthetic sequence
ggcgacgcccaggccaacgtgctgcggggcgccggcggagccgacgtgctggccggcgga

SEQ ID NO: 3804 - DNA, 60 bp, Artificial Sequence
  Description of Artificial Sequence: targeting sequence/synthetic sequence
cactctcggaattccatcaccctcaccaacctcactccaggcacagagtatgtggtcagc

SEQ ID NO: 3805 - DNA, 60 bp, Artificial Sequence
  Description of Artificial Sequence: targeting sequence/synthetic sequence
cggagagtgcccctggaggaattcaacaccaacatcgccagcgtgaccgtgaacaagctg

SEQ ID NO: 3806 - DNA, 60 bp, Artificial Sequence
  Description of Artificial Sequence: targeting sequence/synthetic sequence
ctgccaggcctcatggacatgcaggctgtggaccgggcacagccactaggttttaacaag

SEQ ID NO: 3807 - DNA, 60 bp, Artificial Sequence
  Description of Artificial Sequence: targeting sequence/synthetic sequence
accctcaagcagacctacagcaagtttgacacaaactcgcacaaccatgacgcactgctc

SEQ ID NO: 3808 - DNA, 60 bp, Artificial Sequence
  Description of Artificial Sequence: targeting sequence/synthetic sequence
aaccagaacaatgccgacatccaggtggtcaacgccatcagctccctgacctaccccggc

SEQ ID NO: 3809 - DNA, 60 bp, Artificial Sequence
  Description of Artificial Sequence: targeting sequence/synthetic sequence
gccatagcggacttagggttggctgtgaagcatgattcaatactgaacactatcgacata

SEQ ID NO: 3810 - DNA, 60 bp, Artificial Sequence
  Description of Artificial Sequence: targeting sequence/synthetic sequence
aaggagcctggaggaggcgcggcgactgaggagggcgtgaataggatcgcagtgccaaaa

SEQ ID NO: 3811 - DNA, 60 bp, Artificial Sequence
  Description of Artificial Sequence: targeting sequence/synthetic sequence
gccctgatcattggcaacctggtgaccgccaacgccgagagcaacaagcagaacaccgcc

SEQ ID NO: 3812 - DNA, 60 bp, Artificial Sequence
  Description of Artificial Sequence: targeting sequence/synthetic sequence
accaccgacaatgacatcgcactgctgcacctggcccagcccgccaccctctcgcagacc

SEQ ID NO: 3813 - DNA, 60 bp, Artificial Sequence
  Description of Artificial Sequence: targeting sequence/synthetic sequence
ctggtaaatgaaccatactacaacgaagccggcttcgacagtgaccgaggcctgcaggaa

SEQ ID NO: 3814 - DNA, 60 bp, Artificial Sequence
  Description of Artificial Sequence: targeting sequence/synthetic sequence
gctgatgagctggtgtcagagttcaccaattcaaataaccatttggctgctgattcgcag

SEQ ID NO: 3815 - DNA, 60 bp, Artificial Sequence
  Description of Artificial Sequence: targeting sequence/synthetic sequence
gggtctgatgatgagggcagatacctaactcaggaaactaacaaggtggagacgtacaaa

SEQ ID NO: 3816 - DNA, 60 bp, Artificial Sequence
  Description of Artificial Sequence: targeting sequence/synthetic sequence
gacttagggttggctgtgaagcatgattcaatactgaacactatcgacatacctcagaat

SEQ ID NO: 3817 - DNA, 60 bp, Artificial Sequence
  Description of Artificial Sequence: targeting sequence/synthetic sequence
aatggtggcttccatttcagctatggagatgacaatctggctcccaacactgccaacgtc

SEQ ID NO: 3818 - DNA, 60 bp, Artificial Sequence
  Description of Artificial Sequence: targeting sequence/synthetic sequence
cagcggatccacaacagcaacatcctggacgagcggcagggcctgatgcacgagctgatg

SEQ ID NO: 3819 - DNA, 60 bp, Artificial Sequence
  Description of Artificial Sequence: targeting sequence/synthetic sequence
actgattatggtaacttcctggccaacgaggcatcacctctgacggtgtcagtcatcgat

SEQ ID NO: 3820 - DNA, 60 bp, Artificial Sequence
  Description of Artificial Sequence: targeting sequence/synthetic sequence
aaggctccagggtttggtgacaatagaaagaaccagcttaaagatatggctattgctact

SEQ ID NO: 3821 - DNA, 60 bp, Artificial Sequence
  Description of Artificial Sequence: targeting sequence/synthetic sequence
ctcaagcagacctacagcaagtttgacacaaactcgcacaaccatgacgcactgctcaag

SEQ ID NO: 3822 - DNA, 60 bp, Artificial Sequence
  Description of Artificial Sequence: targeting sequence/synthetic sequence
agcaccaccgacaatgacatcgcactgctgcacctggcccagcccgccaccctctcgcag

SEQ ID NO: 3823 - DNA, 60 bp, Artificial Sequence
  Description of Artificial Sequence: targeting sequence/synthetic sequence
aacgtgtaccgggagggcgtggccacccagaccacagcctacggcaagcggaccgagaac

SEQ ID NO: 3824 - DNA, 60 bp, Artificial Sequence
  Description of Artificial Sequence: targeting sequence/synthetic sequence
cactacgacggcggagccggcaccaacaccgtgagctacgccgctctgggccggcaggac

SEQ ID NO: 3825 - DNA, 60 bp, Artificial Sequence
  Description of Artificial Sequence: targeting sequence/synthetic sequence
cgcttgaagattcagtcggaaaatgtgcccaacgccaccatctacccgggccagtccatc

SEQ ID NO: 3826 - DNA, 60 bp, Artificial Sequence
  Description of Artificial Sequence: targeting sequence/synthetic sequence
tacaccttcggcggagacatcagcatcagcaacggcctgagcggcggactgaacggcaac

SEQ ID NO: 3827 - DNA, 60 bp, Artificial Sequence
  Description of Artificial Sequence: targeting sequence/synthetic sequence
ctgagcgggaaggtgaggagtgaggggaccaattccacgctgaccctgagccctgtgagt

SEQ ID NO: 3828 - DNA, 60 bp, Artificial Sequence
  Description of Artificial Sequence: targeting sequence/synthetic sequence
tacctgggcgaccggagagtgcccctggaggaattcaacaccaacatcgccagcgtgacc

SEQ ID NO: 3829 - DNA, 60 bp, Artificial Sequence
  Description of Artificial Sequence: targeting sequence/synthetic sequence
gacgcgcgctcggccatgaacaagcacaacaacgaggcgggccgcacgactatcctggac

SEQ ID NO: 3830 - DNA, 60 bp, Artificial Sequence
  Description of Artificial Sequence: targeting sequence/synthetic sequence
ctgcagatctacccggatggcaaagtcaatggatcccacgaagccaatatgttaagtgtt

SEQ ID NO: 3831 - DNA, 60 bp, Artificial Sequence
  Description of Artificial Sequence: targeting sequence/synthetic sequence
aagaacaatcggctgccctacgtggccgacaaggacagcatcagccaggagatcttcgag

SEQ ID NO: 3832 - DNA, 60 bp, Artificial Sequence
  Description of Artificial Sequence: targeting sequence/synthetic sequence
gctaagaagctcatcaacgactacgtgaagaatggaactagggggaaaatcacagatctg

SEQ ID NO: 3833 - DNA, 60 bp, Artificial Sequence
  Description of Artificial Sequence: targeting sequence/synthetic sequence
tattaccaaggtggcacttactcaaaagcatctactcctaatggttatgataatggcatt

SEQ ID NO: 3834 - DNA, 60 bp, Artificial Sequence
  Description of Artificial Sequence: targeting sequence/synthetic sequence
aggacaaaaggtgccgggaacatggtcaacggattggccaacaatgctgaaattgatgac

SEQ ID NO: 3835 - DNA, 60 bp, Artificial Sequence
  Description of Artificial Sequence: targeting sequence/synthetic sequence
aagaagccctcggacacggccaagccagcggcccccggaggcgggcgggctgcccagctg

SEQ ID NO: 3836 - DNA, 60 bp, Artificial Sequence
  Description of Artificial Sequence: targeting sequence/synthetic sequence
aacctgccaggcctcatggacatgcaggctgtggaccgggcacagccactaggttttaac

SEQ ID NO: 3837 - DNA, 60 bp, Artificial Sequence
  Description of Artificial Sequence: targeting sequence/synthetic sequence
agcatcctgggcgagagccagcaagagctgaacagcatggtgaccgacaccctgaacaat

SEQ ID NO: 3838 - DNA, 60 bp, Artificial Sequence
  Description of Artificial Sequence: targeting sequence/synthetic sequence
aatgacgtggagatccgggcagagggcaatagcaggttcacgtacactgccctgaaggat

SEQ ID NO: 3839 - DNA, 60 bp, Artificial Sequence
  Description of Artificial Sequence: targeting sequence/synthetic sequence
cagatcctgaaggaaaattacgggcagaaggaggctgagaaagtggcccgggtgaaggcg

SEQ ID NO: 3840 - DNA, 60 bp, Artificial Sequence
  Description of Artificial Sequence: targeting sequence/synthetic sequence
aacggcctgagcggcggactgaacggcaacaccgccttcagcgagaccatcaactacaag

SEQ ID NO: 3841 - DNA, 60 bp, Artificial Sequence
  Description of Artificial Sequence: targeting sequence/synthetic sequence
aacgcgcggcgcctcatgaacctgcataacaatgaggccggcaggaaggttctagaggac

SEQ ID NO: 3842 - DNA, 60 bp, Artificial Sequence
  Description of Artificial Sequence: targeting sequence/synthetic sequence
cagcacggcagcatcctgggcgagagccagcaagagctgaacagcatggtgaccgacacc

SEQ ID NO: 3843 - DNA, 60 bp, Artificial Sequence
  Description of Artificial Sequence: targeting sequence/synthetic sequence
atgaagaggacagctttggtagccaatacctccaatatgcctgttgctgctagagaagcc

SEQ ID NO: 3844 - DNA, 60 bp, Artificial Sequence
  Description of Artificial Sequence: targeting sequence/synthetic sequence
cggggtgacacggatgtcagggtagagaggaaagacccaaaccaggtggaactgtgggga

SEQ ID NO: 3845 - DNA, 60 bp, Artificial Sequence
  Description of Artificial Sequence: targeting sequence/synthetic sequence
atattctttcagagaagtgtcccaggacatgataataagatgcaatttgaatcttcatca

SEQ ID NO: 3846 - DNA, 60 bp, Artificial Sequence
  Description of Artificial Sequence: targeting sequence/synthetic sequence
acctacagcaagtttgacacaaactcacacaaccatgacgcactgctcaagaactacggg

SEQ ID NO: 3847 - DNA, 60 bp, Artificial Sequence
  Description of Artificial Sequence: targeting sequence/synthetic sequence
cagaccttccccagcaacatcgagaacctgcagctgaccaacagcctgaacgacgccctg

SEQ ID NO: 3848 - DNA, 60 bp, Artificial Sequence
  Description of Artificial Sequence: targeting sequence/synthetic sequence
gagaccacaaagcagctgatcaacctgaaggagatcaacgccaacgtggtcagctccccc

SEQ ID NO: 3849 - DNA, 60 bp, Artificial Sequence
  Description of Artificial Sequence: targeting sequence/synthetic sequence
ggcggccgcaaactgacacctcagggacaaagagatctggacagaatcgccggacaggtg

SEQ ID NO: 3850 - DNA, 60 bp, Artificial Sequence
  Description of Artificial Sequence: targeting sequence/synthetic sequence
aagatccagaccatcatgaacgccatccccgacctgaagatcgtgcccatcgaccccatc

SEQ ID NO: 3851 - DNA, 60 bp, Artificial Sequence
  Description of Artificial Sequence: targeting sequence/synthetic sequence
gtgcgggccggcaccgagagcgagcagagcctgcagaagatcattgacgatcgggcccag

SEQ ID NO: 3852 - DNA, 60 bp, Artificial Sequence
  Description of Artificial Sequence: targeting sequence/synthetic sequence
ggattcatccacagagacatcaaaccagacaaccttcttttggacagcaagggccatgtg

SEQ ID NO: 3853 - DNA, 60 bp, Artificial Sequence
  Description of Artificial Sequence: targeting sequence/synthetic sequence
ctgatcaacctgaaggagatcaacgccaacgtggtcagctcccccggcctgctcagcgcc

SEQ ID NO: 3854 - DNA, 60 bp, Artificial Sequence
  Description of Artificial Sequence: targeting sequence/synthetic sequence
atggatataaataaacctggacccctttttaagccggaaaatggattgctggaaaccaaa

SEQ ID NO: 3855 - DNA, 60 bp, Artificial Sequence
  Description of Artificial Sequence: targeting sequence/synthetic sequence
caggtggaccaggtgatccggaacgccctggccagccccggcagcggcggagacctgggc

SEQ ID NO: 3856 - DNA, 60 bp, Artificial Sequence
  Description of Artificial Sequence: targeting sequence/synthetic sequence
gtcagatcatcttctcgaaccccgagtgacaagcctgtagcccatgttgtagcaaaccct

SEQ ID NO: 3857 - DNA, 60 bp, Artificial Sequence
  Description of Artificial Sequence: targeting sequence/synthetic sequence
aagccctcggacacggccaagccagcggcccccggaggcgggcgggctgcccagctgaag

SEQ ID NO: 3858 - DNA, 60 bp, Artificial Sequence
  Description of Artificial Sequence: targeting sequence/synthetic sequence
cacctgactgggcagaccctcaagcagacctacagcaagtttgacacaaactcgcacaac

SEQ ID NO: 3859 - DNA, 60 bp, Artificial Sequence
  Description of Artificial Sequence: targeting sequence/synthetic sequence
gtggtcctgggcggagacgcccaggagcacaacaaggtggtcaccaaggacttcgacgag

SEQ ID NO: 3860 - DNA, 60 bp, Artificial Sequence
  Description of Artificial Sequence: targeting sequence/synthetic sequence
aagaaggagcctggaggaggcgcggcgactgaggagggcgtgaataggatcgcagtgcca

SEQ ID NO: 3861 - DNA, 60 bp, Artificial Sequence
  Description of Artificial Sequence: targeting sequence/synthetic sequence
ccgcagatgagaatggagttagagagacctggtggaaatgagattactcgaggaggctcc

SEQ ID NO: 3862 - DNA, 60 bp, Artificial Sequence
  Description of Artificial Sequence: targeting sequence/synthetic sequence
ctggacaccgaccaggtgtacggcaacatcgccacctacaacttcgagaacggccgggtg

SEQ ID NO: 3863 - DNA, 60 bp, Artificial Sequence
  Description of Artificial Sequence: targeting sequence/synthetic sequence
gccgacgtgcggcacgagatccccgtgctgcccaaccgggtgggcctgcccatcaaccag

SEQ ID NO: 3864 - DNA, 60 bp, Artificial Sequence
  Description of Artificial Sequence: targeting sequence/synthetic sequence
accctttcactagacacgtccaagaaccagttctccctgagactgaactctgtgaccgct

SEQ ID NO: 3865 - DNA, 60 bp, Artificial Sequence
  Description of Artificial Sequence: targeting sequence/synthetic sequence
caccacagcacgcaggagaacgccatcctggccatcgagcagtacgaggagctggtggac

SEQ ID NO: 3866 - DNA, 60 bp, Artificial Sequence
  Description of Artificial Sequence: targeting sequence/synthetic sequence
ctgaaagtgaccggggtgcctggcacggagtttgtgcagaagctgaacgacaaagcggcc

SEQ ID NO: 3867 - DNA, 60 bp, Artificial Sequence
  Description of Artificial Sequence: targeting sequence/synthetic sequence
ccccactctcggaattccatcaccctcaccaacctcactccaggcacagagtatgtggtc

SEQ ID NO: 3868 - DNA, 60 bp, Artificial Sequence
  Description of Artificial Sequence: targeting sequence/synthetic sequence
agcgccggcatccccagcctggtgaacaatgagctgatcctgcacgacaaggccaccagc

SEQ ID NO: 3869 - DNA, 60 bp, Artificial Sequence
  Description of Artificial Sequence: targeting sequence/synthetic sequence
atgtacaacgccctgaacaatcagagccaggccatcgagaagatcattgaggaccagtac

SEQ ID NO: 3870 - DNA, 60 bp, Artificial Sequence
  Description of Artificial Sequence: targeting sequence/synthetic sequence
ttcgcccccgccaacaccgtgaacgacaacatctacggccaggccgtggagtacagcggc

SEQ ID NO: 3871 - DNA, 60 bp, Artificial Sequence
  Description of Artificial Sequence: targeting sequence/synthetic sequence
gtagcagctcacataactgggaccagaggaagaagcaacacattgtcttctccaaactcc

SEQ ID NO: 3872 - DNA, 60 bp, Artificial Sequence
  Description of Artificial Sequence: targeting sequence/synthetic sequence
agcttcaccgccgtggtcctgggcggagacgcccaggagcacaacaaggtggtcaccaag

SEQ ID NO: 3873 - DNA, 60 bp, Artificial Sequence
  Description of Artificial Sequence: targeting sequence/synthetic sequence
ataataaacaacaagaactttgataaagtgacaggtatgggcgttcgaaacggaacagac

SEQ ID NO: 3874 - DNA, 60 bp, Artificial Sequence
  Description of Artificial Sequence: targeting sequence/synthetic sequence
ctccgcttgaagattcagtcggaaaatgtgcccaacgccaccatctacccgggccagtcc

SEQ ID NO: 3875 - DNA, 60 bp, Artificial Sequence
  Description of Artificial Sequence: targeting sequence/synthetic sequence
gctgatgggaacgtggactaccacatgaactctgtccccatccagcaagagatcctggtc

SEQ ID NO: 3876 - DNA, 60 bp, Artificial Sequence
  Description of Artificial Sequence: targeting sequence/synthetic sequence
aacctgacccacctgccagccaacctcctccagggcgcctctaagctccaagaattgcac

SEQ ID NO: 3877 - DNA, 60 bp, Artificial Sequence
  Description of Artificial Sequence: targeting sequence/synthetic sequence
accacaggcgccgacgtgcggcacgagatccccgtgctgcccaaccgggtgggcctgccc

SEQ ID NO: 3878 - DNA, 60 bp, Artificial Sequence
  Description of Artificial Sequence: targeting sequence/synthetic sequence
aggggaagtgccctagaagaaaaagagaataaaatattggtcaaagaaactggttacttt

SEQ ID NO: 3879 - DNA, 60 bp, Artificial Sequence
  Description of Artificial Sequence: targeting sequence/synthetic sequence
ttggtagacacaggcattggcatgaccaaagctgatctcataaataatttgggaaccatt

SEQ ID NO: 3880 - DNA, 60 bp, Artificial Sequence
  Description of Artificial Sequence: targeting sequence/synthetic sequence
ttcctgaacaatctgaagcagctgcccctgctcgagaaccagatcagcaacctggagcag

SEQ ID NO: 3881 - DNA, 60 bp, Artificial Sequence
  Description of Artificial Sequence: targeting sequence/synthetic sequence
attgtcaccaggatcaatgacatttcacacacgcagtcagtctcctccaaacagaaagtc

SEQ ID NO: 3882 - DNA, 60 bp, Artificial Sequence
  Description of Artificial Sequence: targeting sequence/synthetic sequence
atctacaagaacaatacccacgacctggtgggcgacgtgcggctggccggcgtgatcatg

SEQ ID NO: 3883 - DNA, 60 bp, Artificial Sequence
  Description of Artificial Sequence: targeting sequence/synthetic sequence
ttcatcaccagcttccccgagggctacaacacggtcgtcggtgaacggggcactaccctg

SEQ ID NO: 3884 - DNA, 60 bp, Artificial Sequence
  Description of Artificial Sequence: targeting sequence/synthetic sequence
ggcgccaacgtgctgaacggcctggccggcaacgacgtgctgagcggcggagccggcgac

SEQ ID NO: 3885 - DNA, 60 bp, Artificial Sequence
  Description of Artificial Sequence: targeting sequence/synthetic sequence
agcatcttccggggcatccaggcctacaacgagatcgagaacgtgctgaagagcaagcag

SEQ ID NO: 3886 - DNA, 60 bp, Artificial Sequence
  Description of Artificial Sequence: targeting sequence/synthetic sequence
gccctgacactgaccaaggcgcctgtggacctgctcggtgttgcccacaacaacctcatg

SEQ ID NO: 3887 - DNA, 60 bp, Artificial Sequence
  Description of Artificial Sequence: targeting sequence/synthetic sequence
aagacaattgtcaccaggatcaatgacatttcacacacgcagtcagtctcctccaaacag

SEQ ID NO: 3888 - DNA, 60 bp, Artificial Sequence
  Description of Artificial Sequence: targeting sequence/synthetic sequence
ctgaacgtgatccggagcgccatcggcacccccctgcagaccatcagctccggcggaacc

SEQ ID NO: 3889 - DNA, 60 bp, Artificial Sequence
  Description of Artificial Sequence: targeting sequence/synthetic sequence
atccattcagctaacgttctgcaccgtgacctcaagccttccaacctgctgctcaacacc

SEQ ID NO: 3890 - DNA, 60 bp, Artificial Sequence
  Description of Artificial Sequence: targeting sequence/synthetic sequence
gtgaggtccaacctgccaggcctcatggacatgcaggctgtggaccgggcacagccacta

SEQ ID NO: 3891 - DNA, 60 bp, Artificial Sequence
  Description of Artificial Sequence: targeting sequence/synthetic sequence
aacaacggctccaattttcagctggaggaaatttcccgggctcagcttgtgcccctccca

SEQ ID NO: 3892 - DNA, 60 bp, Artificial Sequence
  Description of Artificial Sequence: targeting sequence/synthetic sequence
gacaacgtgcggaacgtggagaacgtgatcggcaccagcatgaaggacgtgctgatcggc

SEQ ID NO: 3893 - DNA, 60 bp, Artificial Sequence
  Description of Artificial Sequence: targeting sequence/synthetic sequence
gggcctgaggtctccagggactccaacaccctccagagagaatcactggccaacccactg

SEQ ID NO: 3894 - DNA, 60 bp, Artificial Sequence
  Description of Artificial Sequence: targeting sequence/synthetic sequence
aatgaaggtagaatcagagacagtgttgatctgcaatcattgatgactgaaatgaatcga

SEQ ID NO: 3895 - DNA, 60 bp, Artificial Sequence
  Description of Artificial Sequence: targeting sequence/synthetic sequence
aacagctccttcaccgccgtggtcctgggcggagacgcccaggagcacaacaaggtggtc

SEQ ID NO: 3896 - DNA, 60 bp, Artificial Sequence
  Description of Artificial Sequence: targeting sequence/synthetic sequence
cttgttgctgtccttggatcccaggcccagttcacaaatgatgcagagacagagttaatg

SEQ ID NO: 3897 - DNA, 60 bp, Artificial Sequence
  Description of Artificial Sequence: targeting sequence/synthetic sequence
atcgccctgcaccagagcatgctgagctcccaggccatcgacaacctgcgggccagcctg

SEQ ID NO: 3898 - DNA, 60 bp, Artificial Sequence
  Description of Artificial Sequence: targeting sequence/synthetic sequence
tggctgaaccgccgggccaatgccctcctggccaatggcgtggagctgagagataaccag

SEQ ID NO: 3899 - DNA, 60 bp, Artificial Sequence
  Description of Artificial Sequence: targeting sequence/synthetic sequence
aaactgcgctatgactcggctgtcaaggtgtccagtgccaccaatgaggccttgggccgc

SEQ ID NO: 3900 - DNA, 60 bp, Artificial Sequence
  Description of Artificial Sequence: targeting sequence/synthetic sequence
cggggcgtgcaggagagcgtgcaggacaccttccccaaccaggtgaccctgaccaacatc

SEQ ID NO: 3901 - DNA, 60 bp, Artificial Sequence
  Description of Artificial Sequence: targeting sequence/synthetic sequence
ttcggctactatagcaacaatctgaaggacgtgaaggtgatcaccaaggacaacgtgaac

SEQ ID NO: 3902 - DNA, 60 bp, Artificial Sequence
  Description of Artificial Sequence: targeting sequence/synthetic sequence
agcctgcagaccggcagcgaggaacggaagagcctgtacaacaccgtggccaccctgtac

SEQ ID NO: 3903 - DNA, 60 bp, Artificial Sequence
  Description of Artificial Sequence: targeting sequence/synthetic sequence
ggcgtgcagcaaagcgtgcaggacgccttccccaacaatgtgatcctgagctccatcaac

SEQ ID NO: 3904 - DNA, 60 bp, Artificial Sequence
  Description of Artificial Sequence: targeting sequence/synthetic sequence
cgagtggtagccaccaaccctattgggacaggagatccaagcaccccatctcgaatgatc

SEQ ID NO: 3905 - DNA, 60 bp, Artificial Sequence
  Description of Artificial Sequence: targeting sequence/synthetic sequence
tccaaagaggtccagaatgccctggccagagcgagcaacacggcggaggagaccatcagt

SEQ ID NO: 3906 - DNA, 60 bp, Artificial Sequence
  Description of Artificial Sequence: targeting sequence/synthetic sequence
ctgaagcacaagtatgagacggcactcaaggtgggcagcaccaccaatgaagctgccggc

SEQ ID NO: 3907 - DNA, 60 bp, Artificial Sequence
  Description of Artificial Sequence: targeting sequence/synthetic sequence
atcaatggtggcttccatttcagctatggagatgacaatctggctcccaacactgccaac

SEQ ID NO: 3908 - DNA, 60 bp, Artificial Sequence
  Description of Artificial Sequence: targeting sequence/synthetic sequence
aggaggtatcagtctagagttacccagggcctcgtggccggagaaactgcccagcagatc

SEQ ID NO: 3909 - DNA, 60 bp, Artificial Sequence
  Description of Artificial Sequence: targeting sequence/synthetic sequence
ctctacactgtcttgcaccgcctgggtcatcctgagcccaaccatgtgacggaggcctct

SEQ ID NO: 3910 - DNA, 60 bp, Artificial Sequence
  Description of Artificial Sequence: targeting sequence/synthetic sequence
tatcacttagctgtcaaggcatataattctgctgggacaggcccctctagtgcaacagtc

SEQ ID NO: 3911 - DNA, 60 bp, Artificial Sequence
  Description of Artificial Sequence: targeting sequence/synthetic sequence
gtgagctcccagatcctgaaccccaacgagaccggcaccttcagccagagcctgaccaag

SEQ ID NO: 3912 - DNA, 60 bp, Artificial Sequence
  Description of Artificial Sequence: targeting sequence/synthetic sequence
gctttggtagccaatacctccaatatgcctgttgctgctagagaagcctctatttatact

SEQ ID NO: 3913 - DNA, 60 bp, Artificial Sequence
  Description of Artificial Sequence: targeting sequence/synthetic sequence
tacaaactgcgcacagaaggagatggagtatacaccttaaatgataagaagcagtggata

SEQ ID NO: 3914 - DNA, 60 bp, Artificial Sequence
  Description of Artificial Sequence: targeting sequence/synthetic sequence
cgcaaggagaaggacaagacgcgcgccgactccgtggccaacaagctgggcagcttcagc

SEQ ID NO: 3915 - DNA, 60 bp, Artificial Sequence
  Description of Artificial Sequence: targeting sequence/synthetic sequence
atcatcatgaaggttgggcaagatcccaatgctgtgacgcctgagcagctgactaccagc

SEQ ID NO: 3916 - DNA, 60 bp, Artificial Sequence
  Description of Artificial Sequence: targeting sequence/synthetic sequence
ctcaacaagctgcttggtaaagtgaccatcgcccagggtggtgtcctgcccaatatccag

SEQ ID NO: 3917 - DNA, 60 bp, Artificial Sequence
  Description of Artificial Sequence: targeting sequence/synthetic sequence
tccaacctgccaggcctcatggacatgcaggctgtggaccgggcacagccactaggtttt

SEQ ID NO: 3918 - DNA, 60 bp, Artificial Sequence
  Description of Artificial Sequence: targeting sequence/synthetic sequence
tttagagtcaacagaaacaatctggagttgtcgacaccacttaaaatagaaaccatctcc

SEQ ID NO: 3919 - DNA, 60 bp, Artificial Sequence
  Description of Artificial Sequence: targeting sequence/synthetic sequence
gccaagattcctggtctgctgaaccaaacctccaggtccctggaccaaatccccggatac

SEQ ID NO: 3920 - DNA, 60 bp, Artificial Sequence
  Description of Artificial Sequence: targeting sequence/synthetic sequence
tatatccattcagctaacgttctgcaccgtgacctcaagccttccaacctgctgctcaac

SEQ ID NO: 3921 - DNA, 60 bp, Artificial Sequence
  Description of Artificial Sequence: targeting sequence/synthetic sequence
ggccggaccttggaaatacctggcaactctgatcccaatatgatccctgatggggacttt

SEQ ID NO: 3922 - DNA, 60 bp, Artificial Sequence
  Description of Artificial Sequence: targeting sequence/synthetic sequence
gaggaaaccatcgacaccgtgatcagcaacgccctgcagctgagccagcccaagccccag

SEQ ID NO: 3923 - DNA, 60 bp, Artificial Sequence
  Description of Artificial Sequence: targeting sequence/synthetic sequence
tggtttggaaatcttgcaactaaagcccggaatgaaggtagaatcagagacagtgttgat

SEQ ID NO: 3924 - DNA, 60 bp, Artificial Sequence
  Description of Artificial Sequence: targeting sequence/synthetic sequence
atgaagacccggaacggcagcatgaaggccgctgacaacttcctggaccccaacaaggcc

SEQ ID NO: 3925 - DNA, 60 bp, Artificial Sequence
  Description of Artificial Sequence: targeting sequence/synthetic sequence
atcataataaacaacaagaactttgataaagtgacaggtatgggcgttcgaaacggaaca

SEQ ID NO: 3926 - DNA, 60 bp, Artificial Sequence
  Description of Artificial Sequence: targeting sequence/synthetic sequence
ctgaagggctacttctcccaggaagtcaacattagccttcattaccagaaggatgaggag

SEQ ID NO: 3927 - DNA, 60 bp, Artificial Sequence
  Description of Artificial Sequence: targeting sequence/synthetic sequence
tgcatcaacgctgatgggaacgtggactaccacatgaactctgtccccatccagcaagag

SEQ ID NO: 3928 - DNA, 60 bp, Artificial Sequence
  Description of Artificial Sequence: targeting sequence/synthetic sequence
agctccttcaccgccgtggtcctgggcggagacgccgctgagcacaacaaggtggtcacc

SEQ ID NO: 3929 - DNA, 60 bp, Artificial Sequence
  Description of Artificial Sequence: targeting sequence/synthetic sequence
agcagccagaggagccccgaggcggccggggtccaggacccgagtctgcgctggagcccc

SEQ ID NO: 3930 - DNA, 60 bp, Artificial Sequence
  Description of Artificial Sequence: targeting sequence/synthetic sequence
accattaacaagattccacagctcactctgaatttttcagaggtcaaaactgagaaaaag

SEQ ID NO: 3931 - DNA, 60 bp, Artificial Sequence
  Description of Artificial Sequence: targeting sequence/synthetic sequence
cccaacatgttcaacgtgaacgacgtgctgggcgcctacagcccccaccccgacgagcag

SEQ ID NO: 3932 - DNA, 60 bp, Artificial Sequence
  Description of Artificial Sequence: targeting sequence/synthetic sequence
gtatactggacagacacgggaacaaaccggattgaagtgggcaacctggacgggtccatg

SEQ ID NO: 3933 - DNA, 60 bp, Artificial Sequence
  Description of Artificial Sequence: targeting sequence/synthetic sequence
gttgctgtccttggatcccaggcccagttcacaaatgatgcagagacagagttaatgatg

SEQ ID NO: 3934 - DNA, 60 bp, Artificial Sequence
  Description of Artificial Sequence: targeting sequence/synthetic sequence
tctcgaatgatccgcacaaatgaagcagttccgaagacagcacccaccaatgtaagcgga

SEQ ID NO: 3935 - DNA, 60 bp, Artificial Sequence
  Description of Artificial Sequence: targeting sequence/synthetic sequence
ggcgccggcaccaacaccgtgagctacgccgctctgggccggcaggacagcatcaccgtg

SEQ ID NO: 3936 - DNA, 60 bp, Artificial Sequence
  Description of Artificial Sequence: targeting sequence/synthetic sequence
gaccagcaaaccagccagaacatcaagaaccagctggccgagctgaacgccaccaacatc

SEQ ID NO: 3937 - DNA, 60 bp, Artificial Sequence
  Description of Artificial Sequence: targeting sequence/synthetic sequence
agcaacggcctgagcggcggactgaacggcaacaccgccttcagcgagaccatcaactac

SEQ ID NO: 3938 - DNA, 60 bp, Artificial Sequence
  Description of Artificial Sequence: targeting sequence/synthetic sequence
tatattgtggccaggccagtgtattctacaaatgcttttgaggaaaatcataaaaagaca

SEQ ID NO: 3939 - DNA, 60 bp, Artificial Sequence
  Description of Artificial Sequence: targeting sequence/synthetic sequence
gccgtggtcctgggcggagacgcccaggagcacaacaaggtggtcaccaaggacttcgac

SEQ ID NO: 3940 - DNA, 60 bp, Artificial Sequence
  Description of Artificial Sequence: targeting sequence/synthetic sequence
ttcgacgagatccggaaggtgatcaaggacaacgccaccttcagcaccaagaaccccgcc

SEQ ID NO: 3941 - DNA, 60 bp, Artificial Sequence
  Description of Artificial Sequence: targeting sequence/synthetic sequence
accaagccccctctgcccagcgtgcagaagctggtggaggaccggtggaacaagccccag

SEQ ID NO: 3942 - DNA, 60 bp, Artificial Sequence
  Description of Artificial Sequence: targeting sequence/synthetic sequence
cggctgcccaacctgctgggccacgagaccatgaaggaggtgctggagcaggccggcgct

SEQ ID NO: 3943 - DNA, 60 bp, Artificial Sequence
  Description of Artificial Sequence: targeting sequence/synthetic sequence
gggaatcagtatattgtggccaggccagtgtattctacaaatgcttttgaggaaaatcat

SEQ ID NO: 3944 - DNA, 60 bp, Artificial Sequence
  Description of Artificial Sequence: targeting sequence/synthetic sequence
cccttcgtgacccagaccgccttctaccagaacgacgtgcagaacgccgtggagcggagc

SEQ ID NO: 3945 - DNA, 60 bp, Artificial Sequence
  Description of Artificial Sequence: targeting sequence/synthetic sequence
aagaccctggccaacaagctgagcttcaacttcagcgacaagcaggacgtgcccgtgagc

SEQ ID NO: 3946 - DNA, 60 bp, Artificial Sequence
  Description of Artificial Sequence: targeting sequence/synthetic sequence
ctcaagagcctgagccagcagatcgagaacatccggagcccagagggcagccgcaagaac

SEQ ID NO: 3947 - DNA, 60 bp, Artificial Sequence
  Description of Artificial Sequence: targeting sequence/synthetic sequence
gccttctgggctgtgaaagacactatgcaagctcaggataacatcacgagtgcccggctg

SEQ ID NO: 3948 - DNA, 60 bp, Artificial Sequence
  Description of Artificial Sequence: targeting sequence/synthetic sequence
atcctcaagcagacctacagcaagtttgacacaaactcacacaaccatgacgcactgctc

SEQ ID NO: 3949 - DNA, 60 bp, Artificial Sequence
  Description of Artificial Sequence: targeting sequence/synthetic sequence
ccagggggtcacagctatggtgggggggccaccaatgccaatgccagggcaaagggaggc

SEQ ID NO: 3950 - DNA, 60 bp, Artificial Sequence
  Description of Artificial Sequence: targeting sequence/synthetic sequence
accagcctggtgctgggcaagaaccagaccctggccaccatcaaggccaaggagaaccag

SEQ ID NO: 3951 - DNA, 60 bp, Artificial Sequence
  Description of Artificial Sequence: targeting sequence/synthetic sequence
aagaactacctgatcagcaacctgagcaacaccatcgagaagatcaacaccctgggcctg

SEQ ID NO: 3952 - DNA, 60 bp, Artificial Sequence
  Description of Artificial Sequence: targeting sequence/synthetic sequence
agctaccgggtgggcgtgagcatccggaccaacaccgccttccagcccgacgccgctatg

SEQ ID NO: 3953 - DNA, 60 bp, Artificial Sequence
  Description of Artificial Sequence: targeting sequence/synthetic sequence
agcttcctggtgaaccagatgatcaacgaggccaagaaacagctgctcgagttcgacacc

SEQ ID NO: 3954 - DNA, 60 bp, Artificial Sequence
  Description of Artificial Sequence: targeting sequence/synthetic sequence
attactgctttcaatcatcccctgaatctcaccaagcagcagctctcagaggtggctctg

SEQ ID NO: 3955 - DNA, 60 bp, Artificial Sequence
  Description of Artificial Sequence: targeting sequence/synthetic sequence
tacatcagcttcaaccccaaggagaacaagatcaccgtgaagagcaagaacctgcccgag

SEQ ID NO: 3956 - DNA, 60 bp, Artificial Sequence
  Description of Artificial Sequence: targeting sequence/synthetic sequence
ggacccgggcccgggcccgggcccggcgcagacatgcagcgcagctatgacagctactat

SEQ ID NO: 3957 - DNA, 60 bp, Artificial Sequence
  Description of Artificial Sequence: targeting sequence/synthetic sequence
tacagactacaacaggcccaaaaagggacccccatgaaaccgaacacacaagccacgcct

SEQ ID NO: 3958 - DNA, 60 bp, Artificial Sequence
  Description of Artificial Sequence: targeting sequence/synthetic sequence
aagggctacttctcccaggaagtcaacattagccttcattaccagaaggatgaggagccc

SEQ ID NO: 3959 - DNA, 60 bp, Artificial Sequence
  Description of Artificial Sequence: targeting sequence/synthetic sequence
aacttcaccctcctgcgcacccttgaccttggggagaaccagttggagaccttgccacct

SEQ ID NO: 3960 - DNA, 60 bp, Artificial Sequence
  Description of Artificial Sequence: targeting sequence/synthetic sequence
tttgagaggaggacaaaaggtgccgggaacatggtcaacggattggccaacaatgctgaa

SEQ ID NO: 3961 - DNA, 60 bp, Artificial Sequence
  Description of Artificial Sequence: targeting sequence/synthetic sequence
gtgaagcggaagcccatcaacatcaacatcgacctgcccggcctgaagggcgagaacagc

SEQ ID NO: 3962 - DNA, 60 bp, Artificial Sequence
  Description of Artificial Sequence: targeting sequence/synthetic sequence
atctccaccgaggccaatagagttgaggcacatggtgaggccaccgccacggctccaccc

SEQ ID NO: 3963 - DNA, 60 bp, Artificial Sequence
  Description of Artificial Sequence: targeting sequence/synthetic sequence
agagccaagattcctggtctgctgaaccaaacctccaggtccctggaccaaatccccgga

SEQ ID NO: 3964 - DNA, 60 bp, Artificial Sequence
  Description of Artificial Sequence: targeting sequence/synthetic sequence
gggacagccggcaaaataagcagcatcagccaaccaggaaatgattttagcacaaaggat

SEQ ID NO: 3965 - DNA, 60 bp, Artificial Sequence
  Description of Artificial Sequence: targeting sequence/synthetic sequence
ctgggcattaagagcctggtaagcaagggaacgttggtgcagacaaagggtaccggagcc

SEQ ID NO: 3966 - DNA, 60 bp, Artificial Sequence
  Description of Artificial Sequence: targeting sequence/synthetic sequence
agaggcgatttttcctcagccaataaccgtgataatacctacaaccgagtgtcagaggat

SEQ ID NO: 3967 - DNA, 60 bp, Artificial Sequence
  Description of Artificial Sequence: targeting sequence/synthetic sequence
aacaccagaaataacatgatccagaccaagccaacaggaacccagcaatcgaccaataca

SEQ ID NO: 3968 - DNA, 60 bp, Artificial Sequence
  Description of Artificial Sequence: targeting sequence/synthetic sequence
gcccgctcgcccagccccagcacgcagccctgggagcatgtgaatgccatccaggaggcc

SEQ ID NO: 3969 - DNA, 60 bp, Artificial Sequence
  Description of Artificial Sequence: targeting sequence/synthetic sequence
ctgagcggcggagtgcagcaaagcgtgcaggacaccttccccaacaatgtgatcctgagc

SEQ ID NO: 3970 - DNA, 60 bp, Artificial Sequence
  Description of Artificial Sequence: targeting sequence/synthetic sequence
cggaagcccatcaacatcaacatcgacctgcccggcctgaagggcgagaacagcatcaag

SEQ ID NO: 3971 - DNA, 60 bp, Artificial Sequence
  Description of Artificial Sequence: targeting sequence/synthetic sequence
gagctgaccaacaagtacgacatcaagcagatcgagaacgagctgaaccagaaggtgagc

SEQ ID NO: 3972 - DNA, 60 bp, Artificial Sequence
  Description of Artificial Sequence: targeting sequence/synthetic sequence
gccggcgtggcccacgccatcacagctgcctgtacccagggcaacctgagcgactgtggc

SEQ ID NO: 3973 - DNA, 60 bp, Artificial Sequence
  Description of Artificial Sequence: targeting sequence/synthetic sequence
catctgctccatgggctggtggccgacagtaatctcacgctgggacctggcctgcagccc

SEQ ID NO: 3974 - DNA, 60 bp, Artificial Sequence
  Description of Artificial Sequence: targeting sequence/synthetic sequence
ctcagctttaaaaggggaagtgccctagaagaaaaagagaataaaatattggtcaaagaa

SEQ ID NO: 3975 - DNA, 60 bp, Artificial Sequence
  Description of Artificial Sequence: targeting sequence/synthetic sequence
actgctttcaatcatcccctgaatctcaccaagcagcagctctcagaggtggctctgatg

SEQ ID NO: 3976 - DNA, 60 bp, Artificial Sequence
  Description of Artificial Sequence: targeting sequence/synthetic sequence
ggtcacagctatggtgggggggccaccaatgccaatgccagggcaaagggaggcaccggg

SEQ ID NO: 3977 - DNA, 60 bp, Artificial Sequence
  Description of Artificial Sequence: targeting sequence/synthetic sequence
ctgcggctggacaccgaccaggtgtacggcaacatcgccacctacaacttcgagaacggc

SEQ ID NO: 3978 - DNA, 60 bp, Artificial Sequence
  Description of Artificial Sequence: targeting sequence/synthetic sequence
aacaaagtactattagcaatgaacctacataacaatgaagctggaaggcaggctgtcgcc

SEQ ID NO: 3979 - DNA, 60 bp, Artificial Sequence
  Description of Artificial Sequence: targeting sequence/synthetic sequence
aaggcgctggtgcagaacgacacgcttctgcaggtgaagggcaccggcgccaacggttcc

SEQ ID NO: 3980 - DNA, 60 bp, Artificial Sequence
  Description of Artificial Sequence: targeting sequence/synthetic sequence
ctgggcctcaagagcttggtgagcaagggcaccctggtgcagaccaagggcactggtgct

SEQ ID NO: 3981 - DNA, 60 bp, Artificial Sequence
  Description of Artificial Sequence: targeting sequence/synthetic sequence
aagcagttcaccgccccccctggcaccgtgaaggtgcaggagaccgtgatcacccagcgg

SEQ ID NO: 3982 - DNA, 60 bp, Artificial Sequence
  Description of Artificial Sequence: targeting sequence/synthetic sequence
caatctcatctggaatttagagtcaacagaaacaatctggagttgtcgacaccacttaaa

SEQ ID NO: 3983 - DNA, 60 bp, Artificial Sequence
  Description of Artificial Sequence: targeting sequence/synthetic sequence
agcttcggctactatagcaacaatctgaaggacgtgaaggtgatcaccaaggacaacgtg

SEQ ID NO: 3984 - DNA, 60 bp, Artificial Sequence
  Description of Artificial Sequence: targeting sequence/synthetic sequence
agccggtttttcctacaaggaatccagttgaatacaattcttcctgacgccagagaccct

SEQ ID NO: 3985 - DNA, 60 bp, Artificial Sequence
  Description of Artificial Sequence: targeting sequence/synthetic sequence
caatataaacaattaaaccaacagcatagtcaaataaaagaaatagaaaatcagctcaga

SEQ ID NO: 3986 - DNA, 60 bp, Artificial Sequence
  Description of Artificial Sequence: targeting sequence/synthetic sequence
accgccccccctggcaccgtgaaggtgcaggagaccgtgatcacccagcggggcctggcc

SEQ ID NO: 3987 - DNA, 60 bp, Artificial Sequence
  Description of Artificial Sequence: targeting sequence/synthetic sequence
cggtaccagttcctgaaccagcacctgaaccccgccatcgagagcgacaacaatttcacc

SEQ ID NO: 3988 - DNA, 60 bp, Artificial Sequence
  Description of Artificial Sequence: targeting sequence/synthetic sequence
tggcgcctactgcggggtgacacggatgtcagggtagagaggaaagacccaaaccaggtg

SEQ ID NO: 3989 - DNA, 60 bp, Artificial Sequence
  Description of Artificial Sequence: targeting sequence/synthetic sequence
atgaggaggtatcagtctagagttacccagggcctcgtggccggagaaactgcccagcag

SEQ ID NO: 3990 - DNA, 60 bp, Artificial Sequence
  Description of Artificial Sequence: targeting sequence/synthetic sequence
catctggaatttagagtcaacagaaacaatctggagttgtcgacaccacttaaaatagaa

SEQ ID NO: 3991 - DNA, 60 bp, Artificial Sequence
  Description of Artificial Sequence: targeting sequence/synthetic sequence
aatgctcacgagttcatcaccagcttccccgagggctacaacacggtcgtcggtgaacgg

SEQ ID NO: 3992 - DNA, 60 bp, Artificial Sequence
  Description of Artificial Sequence: targeting sequence/synthetic sequence
atctggatcattcccgagcggaacgtgatcggcaccacaccccaggacttccacccccct

SEQ ID NO: 3993 - DNA, 60 bp, Artificial Sequence
  Description of Artificial Sequence: targeting sequence/synthetic sequence
cccagccccagcacgcagccctgggagcatgtgaatgccatccaggaggcccggcgtctc

SEQ ID NO: 3994 - DNA, 60 bp, Artificial Sequence
  Description of Artificial Sequence: targeting sequence/synthetic sequence
ttcaacttcgaccagcaaaccagccagaacatcaagaaccagctggccgagctgaacgcc

SEQ ID NO: 3995 - DNA, 60 bp, Artificial Sequence
  Description of Artificial Sequence: targeting sequence/synthetic sequence
ctgagcggcggagtgcagcaaagcgtgcaggacgccttccccaacaatgtgatcctgagc

SEQ ID NO: 3996 - DNA, 60 bp, Artificial Sequence
  Description of Artificial Sequence: targeting sequence/synthetic sequence
tactttttcttccgtgaaaatgcaatagatggagaacactctggaaaagctactcacgct

SEQ ID NO: 3997 - DNA, 60 bp, Artificial Sequence
  Description of Artificial Sequence: targeting sequence/synthetic sequence
cgcgagcagctgtgcatccatcctgaggtcaagaaacaagagagtaaccatctacagatc

SEQ ID NO: 3998 - DNA, 60 bp, Artificial Sequence
  Description of Artificial Sequence: targeting sequence/synthetic sequence
gacttcaacatctacagcaacaatttcaacaatctggtgaagctggagcagagcctgggc

SEQ ID NO: 3999 - DNA, 60 bp, Artificial Sequence
  Description of Artificial Sequence: targeting sequence/synthetic sequence
cgggaagcgaatgctcacgagttcatcaccagcttccccgagggctacaacacggtcgtc

SEQ ID NO: 4000 - DNA, 60 bp, Artificial Sequence
  Description of Artificial Sequence: targeting sequence/synthetic sequence
cggactgggcagatcttcaatcagtcctacagcaagtttgacacaaaatcgcacaacgat

SEQ ID NO: 4001 - DNA, 60 bp, Artificial Sequence
  Description of Artificial Sequence: targeting sequence/synthetic sequence
atgggcgcccggaacagcgtgctgcggggcaagaaagccgacgagctggagaagatccgg

SEQ ID NO: 4002 - DNA, 60 bp, Artificial Sequence
  Description of Artificial Sequence: targeting sequence/synthetic sequence
gagttcatcaccagcttccccgagggctacaacacggtcgtcggtgaacggggcactacc

SEQ ID NO: 4003 - DNA, 60 bp, Artificial Sequence
  Description of Artificial Sequence: targeting sequence/synthetic sequence
agggcagccagccgagccaacactgtgcgcagcttccaccatgaagaatctttggaagaa

SEQ ID NO: 4004 - DNA, 60 bp, Artificial Sequence
  Description of Artificial Sequence: targeting sequence/synthetic sequence
ctgggcacgaggggccgcacatgcaacaagacgtccaaggccatcgacggctgtgagctg

SEQ ID NO: 4005 - DNA, 60 bp, Artificial Sequence
  Description of Artificial Sequence: targeting sequence/synthetic sequence
gctgtccttggatcccaggcccagttcacaaatgatgcagagacagagttaatgatgtca

SEQ ID NO: 4006 - DNA, 60 bp, Artificial Sequence
  Description of Artificial Sequence: targeting sequence/synthetic sequence
tgccctgggagcagccagaggagccccgaggcggccggggtccaggacccgagtctgcgc

SEQ ID NO: 4007 - DNA, 60 bp, Artificial Sequence
  Description of Artificial Sequence: targeting sequence/synthetic sequence
atgtaccaggccctgcagaaccaggtgaacgccatcaagaccatcattgagagcaagtac

SEQ ID NO: 4008 - DNA, 60 bp, Artificial Sequence
  Description of Artificial Sequence: targeting sequence/synthetic sequence
ctcgagaagcggttgcaggccctggagaccaagcagcaggaggagctggccagcatcctc

SEQ ID NO: 4009 - DNA, 60 bp, Artificial Sequence
  Description of Artificial Sequence: targeting sequence/synthetic sequence
gcctaccccgagtccaagaccccgctaaccgccaccctctcaaaatccggaaacacattc

SEQ ID NO: 4010 - DNA, 60 bp, Artificial Sequence
  Description of Artificial Sequence: targeting sequence/synthetic sequence
gttgtagctcaccgggagcagcgtgaaggcagcctccaagttggtaacgaagcgccggta

SEQ ID NO: 4011 - DNA, 60 bp, Artificial Sequence
  Description of Artificial Sequence: targeting sequence/synthetic sequence
agtgactcagcggtgttttttgaacaaggtaccacaagaattggaggctcttataaaaag

SEQ ID NO: 4012 - DNA, 60 bp, Artificial Sequence
  Description of Artificial Sequence: targeting sequence/synthetic sequence
acttccaccacgtctcctgccaccccctctgccgggggtgctgcttcctccaggaccccc

SEQ ID NO: 4013 - DNA, 60 bp, Artificial Sequence
  Description of Artificial Sequence: targeting sequence/synthetic sequence
gggcccaaaggctatggctacgggcagggcgcaggcaccctcagcactgacaagggggag

SEQ ID NO: 4014 - DNA, 60 bp, Artificial Sequence
  Description of Artificial Sequence: targeting sequence/synthetic sequence
aagatcattggccagctgcagagctccctgcagaccggcagcgaggaactgaagagcctg

SEQ ID NO: 4015 - DNA, 60 bp, Artificial Sequence
  Description of Artificial Sequence: targeting sequence/synthetic sequence
ttcctgggcgccgctggcagcaccatgggcgccgctagcatcaccctgaccgcccaggtg

SEQ ID NO: 4016 - DNA, 60 bp, Artificial Sequence
  Description of Artificial Sequence: targeting sequence/synthetic sequence
tcccaggtgcagctgcaagagtcgggcccaggactggtgaagccttcggagaccctgtcc

SEQ ID NO: 4017 - DNA, 60 bp, Artificial Sequence
  Description of Artificial Sequence: targeting sequence/synthetic sequence
atcggccagctgcagcccagcctgcagaccggcagcgaggaactgaagagcctgtacaac

SEQ ID NO: 4018 - DNA, 60 bp, Artificial Sequence
  Description of Artificial Sequence: targeting sequence/synthetic sequence
gctcaccgggagcagcgtgaaggcagcctccaagttggtaacgaagcgccggtaacagga

SEQ ID NO: 4019 - DNA, 60 bp, Artificial Sequence
  Description of Artificial Sequence: targeting sequence/synthetic sequence
gctggtcctaagggtgagcctggcagccctggtgaaaatggagctcctggtcagatgggc

SEQ ID NO: 4020 - DNA, 60 bp, Artificial Sequence
  Description of Artificial Sequence: targeting sequence/synthetic sequence
ggccagctgcagcccagcatccagaccggcagcgaggaaatccggagcctgtacaacacc

SEQ ID NO: 4021 - DNA, 60 bp, Artificial Sequence
  Description of Artificial Sequence: targeting sequence/synthetic sequence
gggcccgggcccgggcccggcgcagacatgcagcgcagctatgacagctactattacccc

SEQ ID NO: 4022 - DNA, 60 bp, Artificial Sequence
  Description of Artificial Sequence: targeting sequence/synthetic sequence
cagcaaatcctggtgcagctgcagcccgccctgcagaccggcaccgaggaaatcaagagc

SEQ ID NO: 4023 - DNA, 60 bp, Artificial Sequence
  Description of Artificial Sequence: targeting sequence/synthetic sequence
gagggcgccatggtgcgggtggccgacaccgtgcagaccagcgccaccaacagcgagcgg

SEQ ID NO: 4024 - DNA, 60 bp, Artificial Sequence
  Description of Artificial Sequence: targeting sequence/synthetic sequence
gccgtggagggcgccatggtgcgggtggccgacaccgtgcagaccagcgccaccaacagc

SEQ ID NO: 4025 - DNA, 60 bp, Artificial Sequence
  Description of Artificial Sequence: targeting sequence/synthetic sequence
ccccaggacgtggacagcgtgtgcagcggcaccctgcagaagaccgaggacgtgcacctg

SEQ ID NO: 4026 - DNA, 60 bp, Artificial Sequence
  Description of Artificial Sequence: targeting sequence/synthetic sequence
ttcctgggcgccgctggcagcaccatgggcgccgtgagcgtggccctgaccggccaggcc

SEQ ID NO: 4027 - DNA, 60 bp, Artificial Sequence
  Description of Artificial Sequence: targeting sequence/synthetic sequence
gcacctggaagtgactcagcggtgttttttgaacaaggtaccacaagaattggaggctct

SEQ ID NO: 4028 - DNA, 60 bp, Artificial Sequence
  Description of Artificial Sequence: targeting sequence/synthetic sequence
tacgtgtacaaggtgctaaagcaggtccaccccgacaccggcatctcatccaaggccatg

SEQ ID NO: 4029 - DNA, 60 bp, Artificial Sequence
  Description of Artificial Sequence: targeting sequence/synthetic sequence
cctggccctgctggccccaaaggatctcctggtgaagctggtcgtcccggtgaagctggt

SEQ ID NO: 4030 - DNA, 60 bp, Artificial Sequence
  Description of Artificial Sequence: targeting sequence/synthetic sequence
gtggagggcgccatggtgcgggtggccgacaccgtgcagaccagcgccaccaacagcgag

SEQ ID NO: 4031 - DNA, 60 bp, Artificial Sequence
  Description of Artificial Sequence: targeting sequence/synthetic sequence
tccaccacgtctcctgccaccccctctgccgggggtgctgcttcctccaggacccccaac

SEQ ID NO: 4032 - DNA, 60 bp, Artificial Sequence
  Description of Artificial Sequence: targeting sequence/synthetic sequence
tccgtgtacgtgtacaaggtgctaaagcaggtccaccccgacaccggcatctcatccaag

SEQ ID NO: 4033 - DNA, 60 bp, Artificial Sequence
  Description of Artificial Sequence: targeting sequence/synthetic sequence
aacgaccagccccagaacgtggacagcgtgtgcagcggcaccctgcagaagaccgaggac

SEQ ID NO: 4034 - DNA, 60 bp, Artificial Sequence
  Description of Artificial Sequence: targeting sequence/synthetic sequence
gtggacctgcaggagtcgggcccaggacttgtgaagccttcggagaccctgtccctcacc

SEQ ID NO: 4035 - DNA, 60 bp, Artificial Sequence
  Description of Artificial Sequence: targeting sequence/synthetic sequence
tatctgaccgccgagatcctggagctggcgggcaacgcggctcgggacaacaagaagacg

SEQ ID NO: 4036 - DNA, 60 bp, Artificial Sequence
  Description of Artificial Sequence: targeting sequence/synthetic sequence
ctgaagcaggtccaccccgacaccggcatctcatccaaggccatggggatcatgaattcc

SEQ ID NO: 4037 - DNA, 60 bp, Artificial Sequence
  Description of Artificial Sequence: targeting sequence/synthetic sequence
atccagacagcccacgtgggtgtgggaatcagtgggaatgaaggcatgcaggccaccaac

SEQ ID NO: 4038 - DNA, 60 bp, Artificial Sequence
  Description of Artificial Sequence: targeting sequence/synthetic sequence
cagacagcccacgtgggtgtgggaatcagtgggaatgaaggcatgcaggccaccaacaac

SEQ ID NO: 4039 - DNA, 60 bp, Artificial Sequence
  Description of Artificial Sequence: targeting sequence/synthetic sequence
tatctcacagcagaaatccttgagctggcaggcaatgcgtctcgcgataacaaaaaaact

SEQ ID NO: 4040 - DNA, 60 bp, Artificial Sequence
  Description of Artificial Sequence: targeting sequence/synthetic sequence
ctgcctggggagctggctaagcatgctgtgtccgagggcactaaggcagttaccaagtac

SEQ ID NO: 4041 - DNA, 60 bp, Artificial Sequence
  Description of Artificial Sequence: targeting sequence/synthetic sequence
gaggtgatcgtggagaagaccaagcagaccgtggccagcatcagctccggccccaagcac

SEQ ID NO: 4042 - DNA, 60 bp, Artificial Sequence
  Description of Artificial Sequence: targeting sequence/synthetic sequence
gctcaggatgtggttcaactcaaagaaaaaaaggaatctcgggagaatccacctcctaaa

SEQ ID NO: 4043 - DNA, 60 bp, Artificial Sequence
  Description of Artificial Sequence: targeting sequence/synthetic sequence
agtgggtactcagacccgcaacctgctccgaaaaaactaaaaacatctgagtcctcgacc

SEQ ID NO: 4044 - DNA, 60 bp, Artificial Sequence
  Description of Artificial Sequence: targeting sequence/synthetic sequence
gacttcaagctgcggctgatgaaggacacccagaccatcagccagaccgacgccctgacc

SEQ ID NO: 4045 - DNA, 60 bp, Artificial Sequence
  Description of Artificial Sequence: targeting sequence/synthetic sequence
cggcagatcctgggccagctgcagagctccctgcagaccggcagcgaggaactgaagagc

SEQ ID NO: 4046 - DNA, 60 bp, Artificial Sequence
  Description of Artificial Sequence: targeting sequence/synthetic sequence
ctcaatcagtccagcgatgagctgcagctgagtatgggaaatgccatgtttgtcaaagag

SEQ ID NO: 4047 - DNA, 60 bp, Artificial Sequence
  Description of Artificial Sequence: targeting sequence/synthetic sequence
gagctggaggaagtgatcgtggagaagaccaagcagaccctggccagcgtgagctccggc

SEQ ID NO: 4048 - DNA, 60 bp, Artificial Sequence
  Description of Artificial Sequence: targeting sequence/synthetic sequence
ttcaagctgcggctgatgaaggacacccagaccatcagccagaccgacgccctgaccgag

SEQ ID NO: 4049 - DNA, 60 bp, Artificial Sequence
  Description of Artificial Sequence: targeting sequence/synthetic sequence
gagtatctcacagcagaaatccttgagctggcaggcaatgcgtctcgcgataacaaaaaa

SEQ ID NO: 4050 - DNA, 60 bp, Artificial Sequence
  Description of Artificial Sequence: targeting sequence/synthetic sequence
gtgtacaaggtgctgaagcaagtccaccccgacaccggcatctcatcgaaggccatgggc

SEQ ID NO: 4051 - DNA, 60 bp, Artificial Sequence
  Description of Artificial Sequence: targeting sequence/synthetic sequence
caaatggccccggagatccagcctccatcccaccacttctcccccgagcagcgggccctg

SEQ ID NO: 4052 - DNA, 60 bp, Artificial Sequence
  Description of Artificial Sequence: targeting sequence/synthetic sequence
ctgcttcccggggagctggccaagcacgctgtgtcagagggcaccaaggccgttaccaag

SEQ ID NO: 4053 - DNA, 60 bp, Artificial Sequence
  Description of Artificial Sequence: targeting sequence/synthetic sequence
gaatttttcagtgaaggttgtgcccctgggtctaagaaagactccagtctctgtaagctg

SEQ ID NO: 4054 - DNA, 60 bp, Artificial Sequence
  Description of Artificial Sequence: targeting sequence/synthetic sequence
ccgccccaaatggccccggagatccagcctccatcccaccacttctcccccgagcagcgg

SEQ ID NO: 4055 - DNA, 60 bp, Artificial Sequence
  Description of Artificial Sequence: targeting sequence/synthetic sequence
gagctggccaagcacgccgtgtcggagggcaccaaggccgtcaccaagtacaccagttcc

SEQ ID NO: 4056 - DNA, 60 bp, Artificial Sequence
  Description of Artificial Sequence: targeting sequence/synthetic sequence
aatcagtccagcgatgagctgcagctgagtatgggaaatgccatgtttgtcaaagagcaa

SEQ ID NO: 4057 - DNA, 60 bp, Artificial Sequence
  Description of Artificial Sequence: targeting sequence/synthetic sequence
gatgtggttcaactcaaagaaaaaaaggaatctcgggagaatccacctcctaaactccgg

SEQ ID NO: 4058 - DNA, 60 bp, Artificial Sequence
  Description of Artificial Sequence: targeting sequence/synthetic sequence
ctggctcaggatgtggttcaactcaaagaaaaaaaggaatctcgggagaatccacctcct

SEQ ID NO: 4059 - DNA, 60 bp, Artificial Sequence
  Description of Artificial Sequence: targeting sequence/synthetic sequence
gagtatctgaccgccgagatcctggagctggcgggcaacgcggctcgggacaacaagaag

SEQ ID NO: 4060 - DNA, 60 bp, Artificial Sequence
  Description of Artificial Sequence: targeting sequence/synthetic sequence
caacggcggcaatttctgcggatggcagtgaaggagctggagactgtgttggctgatgaa

SEQ ID NO: 4061 - DNA, 60 bp, Artificial Sequence
  Description of Artificial Sequence: targeting sequence/synthetic sequence
actggggactcagacccgcaacctgctcctaaaaaaatgaaaacatctgagtcctcgacc

SEQ ID NO: 4062 - DNA, 60 bp, Artificial Sequence
  Description of Artificial Sequence: targeting sequence/synthetic sequence
gtggacaacaaccgtgagccccacagcgctgagagtgatgtgactcgctttttgtttgat

SEQ ID NO: 4063 - DNA, 60 bp, Artificial Sequence
  Description of Artificial Sequence: targeting sequence/synthetic sequence
tccgtgtacgtgtacaaggtgctgaagcaggtccaccccgacaccggcatctcgtccaag

SEQ ID NO: 4064 - DNA, 60 bp, Artificial Sequence
  Description of Artificial Sequence: targeting sequence/synthetic sequence
gaggtggcccagggcgccctgaccctgagcctgcccaagcagcaagacagcctgcccgac

SEQ ID NO: 4065 - DNA, 60 bp, Artificial Sequence
  Description of Artificial Sequence: targeting sequence/synthetic sequence
gacaacaaccgtgagccccacagcgctgagagtgatgtgactcgctttttgtttgatgag

SEQ ID NO: 4066 - DNA, 60 bp, Artificial Sequence
  Description of Artificial Sequence: targeting sequence/synthetic sequence
accccaactggggactcagacccgcaacctgctcctaaaaaaatgaaaacatctgagtcc

SEQ ID NO: 4067 - DNA, 60 bp, Artificial Sequence
  Description of Artificial Sequence: targeting sequence/synthetic sequence
ggggaagctggaaaacctggtcgtcctggtgagcgtgggcctcctgggcctcagggtgct

SEQ ID NO: 4068 - DNA, 60 bp, Artificial Sequence
  Description of Artificial Sequence: targeting sequence/synthetic sequence
atgtctgaaaccgtgcctgcagcttctgccagtgctggtgtagccgctatggagaaactt

SEQ ID NO: 4069 - DNA, 60 bp, Artificial Sequence
  Description of Artificial Sequence: targeting sequence/synthetic sequence
gatgaatttttcagtgaaggttgtgcccctgggtctaagaaagactccagtctctgtaag

SEQ ID NO: 4070 - DNA, 60 bp, Artificial Sequence
  Description of Artificial Sequence: targeting sequence/synthetic sequence
cagggcgccctgaccctgagcctgcccaagcagcaagacagcctgcccgacaccaaggcc

SEQ ID NO: 4071 - DNA, 60 bp, Artificial Sequence
  Description of Artificial Sequence: targeting sequence/synthetic sequence
cggcggcaatttctgcggatggcagtgaaggagctggagactgtgttggctgatgaaccg

SEQ ID NO: 4072 - DNA, 60 bp, Artificial Sequence
  Description of Artificial Sequence: targeting sequence/synthetic sequence
tctatctacgtgtacaaggtgctgaagcaagtccaccccgacaccggcatctcatcgaag

SEQ ID NO: 4073 - DNA, 60 bp, Artificial Sequence
  Description of Artificial Sequence: targeting sequence/synthetic sequence
gaaacagtgcctcccgcccccgccgcttctgctgctcctgagaaacctttagctggcaag

SEQ ID NO: 4074 - DNA, 60 bp, Artificial Sequence
  Description of Artificial Sequence: targeting sequence/synthetic sequence
actggtgctaagggagagcctggccctgttggtgttcaaggaccccctggccctgctgga

SEQ ID NO: 4075 - DNA, 60 bp, Artificial Sequence
  Description of Artificial Sequence: targeting sequence/synthetic sequence
ggacctcgtggtagccctggtgagagaggtgaaactggccctccaggacctgctggtttc

SEQ ID NO: 4076 - DNA, 60 bp, Artificial Sequence
  Description of Artificial Sequence: targeting sequence/synthetic sequence
atgtctgaaacagtgcctcccgcccccgccgcttctgctgctcctgagaaacctttagct

SEQ ID NO: 4077 - DNA, 60 bp, Artificial Sequence
  Description of Artificial Sequence: targeting sequence/synthetic sequence
tccgtgtacgtgtacaaggtgctgaagcaggtccaccccgacaccggtatctcgtccaag

SEQ ID NO: 4078 - DNA, 60 bp, Artificial Sequence
  Description of Artificial Sequence: targeting sequence/synthetic sequence
cgcaaactggagaagtcagaagacgaaccacctttgactcttcctaagccttctctaatt

SEQ ID NO: 4079 - DNA, 60 bp, Artificial Sequence
  Description of Artificial Sequence: targeting sequence/synthetic sequence
ctgactgccaacctggaggcccaggccctgtggaaggagccgggcagcaatgtcaccatg

SEQ ID NO: 4080 - DNA, 60 bp, Artificial Sequence
  Description of Artificial Sequence: targeting sequence/synthetic sequence
gaaaccaccggcgtcgagggacccaagggagacactggcccccgaggcccaaggggaccc

SEQ ID NO: 4081 - DNA, 60 bp, Artificial Sequence
  Description of Artificial Sequence: targeting sequence/synthetic sequence
gttacccagtcccaaggctcctcctcacagtcccagggcatatccagctcctctaccagc

SEQ ID NO: 4082 - DNA, 60 bp, Artificial Sequence
  Description of Artificial Sequence: targeting sequence/synthetic sequence
tcccaaggctcctcctcacagtcccagggcatatccagctcctctaccagcacgatgcca

SEQ ID NO: 4083 - DNA, 60 bp, Artificial Sequence
  Description of Artificial Sequence: targeting sequence/synthetic sequence
ggagagctggccaagcacgccgtgtcggagggcaccaaggccgtcaccaagtacaccagc

SEQ ID NO: 4084 - DNA, 60 bp, Artificial Sequence
  Description of Artificial Sequence: targeting sequence/synthetic sequence
atcaatcctaccaatgctgacattgaccttaaagatgacctaggaaacacgctggagaag

SEQ ID NO: 4085 - DNA, 60 bp, Artificial Sequence
  Description of Artificial Sequence: targeting sequence/synthetic sequence
tcaagcttggtggaaactcccccggctgagaacaagcccagaaagcggcagctctcggaa

SEQ ID NO: 4086 - DNA, 60 bp, Artificial Sequence
  Description of Artificial Sequence: targeting sequence/synthetic sequence
aacatcagcgtgaccgaccccagcggcaagagcctgctcctggacccccctaccaacgtg

SEQ ID NO: 4087 - DNA, 60 bp, Artificial Sequence
  Description of Artificial Sequence: targeting sequence/synthetic sequence
gacatctcacacgtcttggaaacagagacaatttttactccaagttctgtgaaaaagaaa

SEQ ID NO: 4088 - DNA, 60 bp, Artificial Sequence
  Description of Artificial Sequence: targeting sequence/synthetic sequence
ctgttcggcgacgagaccctgcagaagtaccagagctccaacgcccagcggagctccgag

SEQ ID NO: 4089 - DNA, 60 bp, Artificial Sequence
  Description of Artificial Sequence: targeting sequence/synthetic sequence
gggtactcagacccgcaacctgctccgaaaaaactaaaaacatctgagtcctcgaccata

SEQ ID NO: 4090 - DNA, 60 bp, Artificial Sequence
  Description of Artificial Sequence: targeting sequence/synthetic sequence
agctttaccgccggggtgcctggcttcgtgctggacaccaacgcctcggtcagcaacgga

SEQ ID NO: 4091 - DNA, 60 bp, Artificial Sequence
  Description of Artificial Sequence: targeting sequence/synthetic sequence
gttcaagaaaagcaacaaaatatttctcccctagtgagagaaagaggtcctcagagagta

SEQ ID NO: 4092 - DNA, 60 bp, Artificial Sequence
  Description of Artificial Sequence: targeting sequence/synthetic sequence
atgccggagacctcgagtgggtactcagacccgcaacctgctccgaaaaaactaaaaaca

SEQ ID NO: 4093 - DNA, 60 bp, Artificial Sequence
  Description of Artificial Sequence: targeting sequence/synthetic sequence
tccccaaccacagcgccccctgcgccacccagcccctcgccctcacccgtgcccaagagc

SEQ ID NO: 4094 - DNA, 60 bp, Artificial Sequence
  Description of Artificial Sequence: targeting sequence/synthetic sequence
gttcccagcctttttgttacaaaagaaggaacaaatgatggttggaagaatgcggctcat

SEQ ID NO: 4095 - DNA, 60 bp, Artificial Sequence
  Description of Artificial Sequence: targeting sequence/synthetic sequence
caagactcaagcttggtggaaactcccccggctgagaacaagcccagaaagcggcagctc

SEQ ID NO: 4096 - DNA, 60 bp, Artificial Sequence
  Description of Artificial Sequence: targeting sequence/synthetic sequence
gtagtagcattccgggagctggtggagccaaggaaacaggatgctgatagtctccagcgg

SEQ ID NO: 4097 - DNA, 60 bp, Artificial Sequence
  Description of Artificial Sequence: targeting sequence/synthetic sequence
ccaaccacagcgccccctgcgccacccagcccctcgccctcacccgtgcccaagagcccc

SEQ ID NO: 4098 - DNA, 60 bp, Artificial Sequence
  Description of Artificial Sequence: targeting sequence/synthetic sequence
acctcgagtgggtactcagacccgcaacctgctccgaaaaaactaaaaacatctgagtcc

SEQ ID NO: 4099 - DNA, 60 bp, Artificial Sequence
  Description of Artificial Sequence: targeting sequence/synthetic sequence
gccataatcaatcctaccaatgctgacattgaccttaaagatgacctaggaaacacgctg

SEQ ID NO: 4100 - DNA, 60 bp, Artificial Sequence
  Description of Artificial Sequence: targeting sequence/synthetic sequence
ggggaattggccaagcacgccgtgtccgagggcaccaaggccgtcaccaagtataccagc

SEQ ID NO: 4101 - DNA, 60 bp, Artificial Sequence
  Description of Artificial Sequence: targeting sequence/synthetic sequence
attgaggatcatttcattgatcttcctagaaaaaagatctctaatttcactaataagaac

SEQ ID NO: 4102 - DNA, 60 bp, Artificial Sequence
  Description of Artificial Sequence: targeting sequence/synthetic sequence
ccgggggagctggccaagcacgcggtgtcggagggcaccaaggccgtcaccaagtacacc

SEQ ID NO: 4103 - DNA, 60 bp, Artificial Sequence
  Description of Artificial Sequence: targeting sequence/synthetic sequence
ccactgaatgggaaggtgacgaatgaggggaccacatctacgctgacaatgaatcctgtt

SEQ ID NO: 4104 - DNA, 60 bp, Artificial Sequence
  Description of Artificial Sequence: targeting sequence/synthetic sequence
caggaggtgtttgatggcaaccagttccagaaggctcaagccatctctgccttccatgag

SEQ ID NO: 4105 - DNA, 60 bp, Artificial Sequence
  Description of Artificial Sequence: targeting sequence/synthetic sequence
ggcggactgatcgacagccccagcatcaacctggacgtgcggaagcagtacaagcgggac

SEQ ID NO: 4106 - DNA, 60 bp, Artificial Sequence
  Description of Artificial Sequence: targeting sequence/synthetic sequence
aaagtaacggaatcagcatctgtgatgccatcccaggatgtgagtgggtctgaagataca

SEQ ID NO: 4107 - DNA, 60 bp, Artificial Sequence
  Description of Artificial Sequence: targeting sequence/synthetic sequence
ctgaaggtggacaacgccgagaccatcaagaaagagctgggcctgagcctgaccgagccc

SEQ ID NO: 4108 - DNA, 60 bp, Artificial Sequence
  Description of Artificial Sequence: targeting sequence/synthetic sequence
ttcagccccgagaccggcaaggccttcaagggcctgaaccagatcggcgactacaagtac

SEQ ID NO: 4109 - DNA, 60 bp, Artificial Sequence
  Description of Artificial Sequence: targeting sequence/synthetic sequence
tcagacatctcacacgtcttggaaacagagacaatttttactccaagttctgtgaaaaag

SEQ ID NO: 4110 - DNA, 60 bp, Artificial Sequence
  Description of Artificial Sequence: targeting sequence/synthetic sequence
ggagagctggctaaacatgctgtgtctgagggcaccaaggctgtcactaagtacaccagc

SEQ ID NO: 4111 - DNA, 60 bp, Artificial Sequence
  Description of Artificial Sequence: targeting sequence/synthetic sequence
gtggaaactcccccggctgagaacaagcccagaaagcggcagctctcggaagagcagcca

SEQ ID NO: 4112 - DNA, 60 bp, Artificial Sequence
  Description of Artificial Sequence: targeting sequence/synthetic sequence
caacaaaatatttctcccctagtgagagaaagaggtcctcagagagtagcagctcacata

SEQ ID NO: 4113 - DNA, 60 bp, Artificial Sequence
  Description of Artificial Sequence: targeting sequence/synthetic sequence
atccccgacaaggagcaggccatcagcgccctgcccgactacgccagccagcccggcaag

SEQ ID NO: 4114 - DNA, 60 bp, Artificial Sequence
  Description of Artificial Sequence: targeting sequence/synthetic sequence
gctctggagaagctggagctgaccaagtacgcagacaagccggctggcacctacagcggc

SEQ ID NO: 4115 - DNA, 60 bp, Artificial Sequence
  Description of Artificial Sequence: targeting sequence/synthetic sequence
gagctggctaagcacgccgtgtcagagggcaccaaggccgtcaccaagtacaccagctct

SEQ ID NO: 4116 - DNA, 60 bp, Artificial Sequence
  Description of Artificial Sequence: targeting sequence/synthetic sequence
ctggagaagctggagctgaccaagtacgcagacaagccggctggcacctacagcggcggc

SEQ ID NO: 4117 - DNA, 60 bp, Artificial Sequence
  Description of Artificial Sequence: targeting sequence/synthetic sequence
aataccataaatccagaagcatctgcttctccttgctgcgtgtcccaagatttagaacct

SEQ ID NO: 4118 - DNA, 60 bp, Artificial Sequence
  Description of Artificial Sequence: targeting sequence/synthetic sequence
cctaccaatgctgacattgaccttaaagatgacctaggaaacacgctggagaagaaaggt

SEQ ID NO: 4119 - DNA, 60 bp, Artificial Sequence
  Description of Artificial Sequence: targeting sequence/synthetic sequence
gaaagagatgcgccaattgtaaacaaagtggtgacaccattgtctccaccaacaaacttg

SEQ ID NO: 4120 - DNA, 60 bp, Artificial Sequence
  Description of Artificial Sequence: targeting sequence/synthetic sequence
ccagcccagccactgggcccgagggcccagctcctgctgaaggccaccccagaggacaac

SEQ ID NO: 4121 - DNA, 60 bp, Artificial Sequence
  Description of Artificial Sequence: targeting sequence/synthetic sequence
aagattgaggatcatttcattgatcttcctagaaaaaagatctctaatttcactaataag

SEQ ID NO: 4122 - DNA, 60 bp, Artificial Sequence
  Description of Artificial Sequence: targeting sequence/synthetic sequence
ataatcaatcctaccaatgctgacattgaccttaaagatgacctaggaaacacgctggag

SEQ ID NO: 4123 - DNA, 60 bp, Artificial Sequence
  Description of Artificial Sequence: targeting sequence/synthetic sequence
tggccagagtctccaaaggcacaggcctcctcagtgcccactgcacaaccccaagcagag

SEQ ID NO: 4124 - DNA, 60 bp, Artificial Sequence
  Description of Artificial Sequence: targeting sequence/synthetic sequence
cccagctccatccccgacaaggagcaggccatcagcgccctgcccgactacgccagccag

SEQ ID NO: 4125 - DNA, 60 bp, Artificial Sequence
  Description of Artificial Sequence: targeting sequence/synthetic sequence
atcctcaccccgacccgcttcctggatgacctgaaggcactggacaagaagctggaggac

SEQ ID NO: 4126 - DNA, 60 bp, Artificial Sequence
  Description of Artificial Sequence: targeting sequence/synthetic sequence
caggacatccagggcaagatggaggccgctatcaagaaaatccccaccatcagcatcgag

SEQ ID NO: 4127 - DNA, 60 bp, Artificial Sequence
  Description of Artificial Sequence: targeting sequence/synthetic sequence
cagaacttcatcttcaagttcaacgagaccgcccccgtgcccaccatcccccctctggac

SEQ ID NO: 4128 - DNA, 60 bp, Artificial Sequence
  Description of Artificial Sequence: targeting sequence/synthetic sequence
ctcaccccgacccgcttcctggatgacctgaaggcactggacaagaagctggaggacatt

SEQ ID NO: 4129 - DNA, 60 bp, Artificial Sequence
  Description of Artificial Sequence: targeting sequence/synthetic sequence
acagcgccccctgcgccacccagcccctcgccctcacccgtgcccaagagcccctctgtg

SEQ ID NO: 4130 - DNA, 60 bp, Artificial Sequence
  Description of Artificial Sequence: targeting sequence/synthetic sequence
tctccaaaggcacaggcctcctcagtgcccactgcacaaccccaagcagagggcagcctc

SEQ ID NO: 4131 - DNA, 60 bp, Artificial Sequence
  Description of Artificial Sequence: targeting sequence/synthetic sequence
aaccaatttcaaagcgacccaccagctcccagtgacaaaagcgttaagattgaggaacgg

SEQ ID NO: 4132 - DNA, 60 bp, Artificial Sequence
  Description of Artificial Sequence: targeting sequence/synthetic sequence
cacaaggacagcctgctcatcgaggagtactcagtcacacagaccacactggaccaggtg

SEQ ID NO: 4133 - DNA, 60 bp, Artificial Sequence
  Description of Artificial Sequence: targeting sequence/synthetic sequence
aaacagggtaatcttgaaagagaatgcatcgaagaactgtgcaataaagaagaagccagg

SEQ ID NO: 4134 - DNA, 60 bp, Artificial Sequence
  Description of Artificial Sequence: targeting sequence/synthetic sequence
aagttcaacgagaccgcccccgtgcccaccatcccccctctggacaccaagatcgacctg

SEQ ID NO: 4135 - DNA, 60 bp, Artificial Sequence
  Description of Artificial Sequence: targeting sequence/synthetic sequence
actgccaacctggaggcccaggccctgtggaaggagccgggcagcaatgtcaccatgagt

SEQ ID NO: 4136 - DNA, 60 bp, Artificial Sequence
  Description of Artificial Sequence: targeting sequence/synthetic sequence
aatgatggtgctcctggtaagaatggagaacgaggtggccctggaggacctggccctcag

SEQ ID NO: 4137 - DNA, 60 bp, Artificial Sequence
  Description of Artificial Sequence: targeting sequence/synthetic sequence
cctggcgcagatggtgttgctggtcccaagggtcccgctggtgaacgtggttctcctggc

SEQ ID NO: 4138 - DNA, 60 bp, Artificial Sequence
  Description of Artificial Sequence: targeting sequence/synthetic sequence
cgatttcaggaggaaataaaagaaaacacaaagaacgacaaacaaatggtccaatatatt

SEQ ID NO: 4139 - DNA, 60 bp, Artificial Sequence
  Description of Artificial Sequence: targeting sequence/synthetic sequence
ttcccccaggaggagtttgatgataaacagttccagaaggctcaagccatctctgtcctc

SEQ ID NO: 4140 - DNA, 60 bp, Artificial Sequence
  Description of Artificial Sequence: targeting sequence/synthetic sequence
agggcacatcagcagaagaaacacagcggttttgaagatgaactctcagaggttcttgag

SEQ ID NO: 4141 - DNA, 60 bp, Artificial Sequence
  Description of Artificial Sequence: targeting sequence/synthetic sequence
caggaactgctctcaaacctgggccacccggagagccccccacggaaacggctgaagagc

SEQ ID NO: 4142 - DNA, 60 bp, Artificial Sequence
  Description of Artificial Sequence: targeting sequence/synthetic sequence
gcacatgcaaaacaaattataaagccatttattctcagaagagtaaaagaagaggttctc

SEQ ID NO: 4143 - DNA, 60 bp, Artificial Sequence
  Description of Artificial Sequence: targeting sequence/synthetic sequence
aatggggttccagcccagccactgggcccgagggcccagctcctgctgaaggccacccca

SEQ ID NO: 4144 - DNA, 60 bp, Artificial Sequence
  Description of Artificial Sequence: targeting sequence/synthetic sequence
ttgaggccaaagaccggtgtcaggggattgcacaaatcactcaccgacgtggccctggag

SEQ ID NO: 4145 - DNA, 60 bp, Artificial Sequence
  Description of Artificial Sequence: targeting sequence/synthetic sequence
agcgttacccagtcccaaggctcctcctcacagtcccagggcatatccagctcctctacc

SEQ ID NO: 4146 - DNA, 60 bp, Artificial Sequence
  Description of Artificial Sequence: targeting sequence/synthetic sequence
gagaagtcagaagacgaaccacctttgactcttcctaagccttctctaattcctcaggag

SEQ ID NO: 4147 - DNA, 60 bp, Artificial Sequence
  Description of Artificial Sequence: targeting sequence/synthetic sequence
aagtcagaagacgaaccacctttgactcttcctaagccttctctaattcctcaggaggtt

SEQ ID NO: 4148 - DNA, 60 bp, Artificial Sequence
  Description of Artificial Sequence: targeting sequence/synthetic sequence
atgtacagcgccctgacccgggaccccttcagcgtgatcgaggaaagcctgcccggcgga

SEQ ID NO: 4149 - DNA, 60 bp, Artificial Sequence
  Description of Artificial Sequence: targeting sequence/synthetic sequence
gatggctctcctggcaaagatggcgtccgtggtctgaccggccccattggtcctcctggc

SEQ ID NO: 4150 - DNA, 60 bp, Artificial Sequence
  Description of Artificial Sequence: targeting sequence/synthetic sequence
agcctgttcggcgacgagaccctgcagaagtaccagagctccaacgcccagcggagctcc

SEQ ID NO: 4151 - DNA, 60 bp, Artificial Sequence
  Description of Artificial Sequence: targeting sequence/synthetic sequence
aaactggagaagtcagaagacgaaccacctttgactcttcctaagccttctctaattcct

SEQ ID NO: 4152 - DNA, 60 bp, Artificial Sequence
  Description of Artificial Sequence: targeting sequence/synthetic sequence
gaactgcaagcggcggctgccgagctgcgaagcctcccgggtctgcctccggccacagcc

SEQ ID NO: 4153 - DNA, 60 bp, Artificial Sequence
  Description of Artificial Sequence: targeting sequence/synthetic sequence
tcaaaagtaacggaatcagcatctgtgatgccatcccaggatgtgagtgggtctgaagat

SEQ ID NO: 4154 - DNA, 60 bp, Artificial Sequence
  Description of Artificial Sequence: targeting sequence/synthetic sequence
gacagccccagcatcaacctggacgtgcggaagcagtacaagcgggacatccagaacatc

SEQ ID NO: 4155 - DNA, 60 bp, Artificial Sequence
  Description of Artificial Sequence: targeting sequence/synthetic sequence
cccagtgtgccaattgagtcccaacccccaccctcaacattgcccccttttctggcccct

SEQ ID NO: 4156 - DNA, 60 bp, Artificial Sequence
  Description of Artificial Sequence: targeting sequence/synthetic sequence
gatgcgccaattgtaaacaaagtggtgacaccattgtctccaccaacaaacttgcatctg

SEQ ID NO: 4157 - DNA, 60 bp, Artificial Sequence
  Description of Artificial Sequence: targeting sequence/synthetic sequence
cccggttcagcctcggacttggaaacgtccgggttacaggagcagcgcaaccatttgcag

SEQ ID NO: 4158 - DNA, 60 bp, Artificial Sequence
  Description of Artificial Sequence: targeting sequence/synthetic sequence
ttcaagttcaacgagaccgcccccgtgcccaccatcccccctctggacaccaagatcgac

SEQ ID NO: 4159 - DNA, 60 bp, Artificial Sequence
  Description of Artificial Sequence: targeting sequence/synthetic sequence
gaagatttccaacccgcagcagcttcagagaccaactgggaatctgtcacaagctctatt

SEQ ID NO: 4160 - DNA, 60 bp, Artificial Sequence
  Description of Artificial Sequence: targeting sequence/synthetic sequence
ctttcccaagctctaccagcaccaccaggggctctaccccttgcccccagctcaacagct

SEQ ID NO: 4161 - DNA, 60 bp, Artificial Sequence
  Description of Artificial Sequence: targeting sequence/synthetic sequence
caggacacggccaagagtccccaccgcaccaagttcaccctgtccctcgacgtccccacc

SEQ ID NO: 4162 - DNA, 60 bp, Artificial Sequence
  Description of Artificial Sequence: targeting sequence/synthetic sequence
accgccggggtgcctggcttcgtgctggacaccaacgcctcggtcagcaacggagctacc

SEQ ID NO: 4163 - DNA, 60 bp, Artificial Sequence
  Description of Artificial Sequence: targeting sequence/synthetic sequence
gctgtcggtcctgctggcaaagatggagaggctggagctcagggaccccctggccctgct

SEQ ID NO: 4164 - DNA, 60 bp, Artificial Sequence
  Description of Artificial Sequence: targeting sequence/synthetic sequence
agctactacatgacaagcagccagctctccacccccctccagcagtggcgccaaggcgag

SEQ ID NO: 4165 - DNA, 60 bp, Artificial Sequence
  Description of Artificial Sequence: targeting sequence/synthetic sequence
ccaaagaccggtgtcaggggattgcacaaatcactcaccgacgtggccctggagcaccat

SEQ ID NO: 4166 - DNA, 60 bp, Artificial Sequence
  Description of Artificial Sequence: targeting sequence/synthetic sequence
atgacaagcagccagctctccacccccctccagcagtggcgccaaggcgagtacaaatgc

SEQ ID NO: 4167 - DNA, 60 bp, Artificial Sequence
  Description of Artificial Sequence: targeting sequence/synthetic sequence
gctaaaggcgatgctggtccccctggccctgccggacccgctggaccccctggccccatt

SEQ ID NO: 4168 - DNA, 60 bp, Artificial Sequence
  Description of Artificial Sequence: targeting sequence/synthetic sequence
gtggtcatcgattcatctaaacacagtgatgattcagtagccatgaagcattttaagtct

SEQ ID NO: 4169 - DNA, 60 bp, Artificial Sequence
  Description of Artificial Sequence: targeting sequence/synthetic sequence
aaaaagtttgacggcccttgcgacccatgccaaggcgctttacctgacccgagtcggagt

SEQ ID NO: 4170 - DNA, 60 bp, Artificial Sequence
  Description of Artificial Sequence: targeting sequence/synthetic sequence
cgccaggcggacgaggagatgaccggctatgtggccacgcgctggtaccgggcacctgag

SEQ ID NO: 4171 - DNA, 60 bp, Artificial Sequence
  Description of Artificial Sequence: targeting sequence/synthetic sequence
gaggttgatggtaaggtagagtcaattatgaagaggacagctttggtagccaatacctcc

SEQ ID NO: 4172 - DNA, 60 bp, Artificial Sequence
  Description of Artificial Sequence: targeting sequence/synthetic sequence
gacaacaataccgacaagagcatcgacttcagcatcagcctggtgagcaagaaccaggtg

SEQ ID NO: 4173 - DNA, 60 bp, Artificial Sequence
  Description of Artificial Sequence: targeting sequence/synthetic sequence
gtcatcgattcatctaaacacagtgatgattcagtagccatgaagcattttaagtctcct

SEQ ID NO: 4174 - DNA, 60 bp, Artificial Sequence
  Description of Artificial Sequence: targeting sequence/synthetic sequence
agaagtgctgaaggaagcaaccctcctaaaccactgaaaaaactacgctttgatattgaa

SEQ ID NO: 4175 - DNA, 60 bp, Artificial Sequence
  Description of Artificial Sequence: targeting sequence/synthetic sequence
tttgaagaaacctatatcccaaaggaccagaagtattcattcctgcatgactcccagacc

SEQ ID NO: 4176 - DNA, 60 bp, Artificial Sequence
  Description of Artificial Sequence: targeting sequence/synthetic sequence
gtggacaacgccgagaccatcaagaaagagctgggcctgagcctgaccgagcccctgatg

SEQ ID NO: 4177 - DNA, 60 bp, Artificial Sequence
  Description of Artificial Sequence: targeting sequence/synthetic sequence
ccccagaacgtggacagcgtgtgcagcggcaccctgcagaagaccgaggacgtgcacctg

SEQ ID NO: 4178 - DNA, 60 bp, Artificial Sequence
  Description of Artificial Sequence: targeting sequence/synthetic sequence
ccttccccaaccacagcgccccctgcgccacccagcccctcgccctcacccgtgcccaag

SEQ ID NO: 4179 - DNA, 60 bp, Artificial Sequence
  Description of Artificial Sequence: targeting sequence/synthetic sequence
gagatgcactacttcagccccgagaccggcaaggccttcaagggcctgaaccagatcggc

SEQ ID NO: 4180 - DNA, 60 bp, Artificial Sequence
  Description of Artificial Sequence: targeting sequence/synthetic sequence
gggaaggtgacgaatgaggggaccacatctacgctgacaatgaatcctgttagttttggg

SEQ ID NO: 4181 - DNA, 60 bp, Artificial Sequence
  Description of Artificial Sequence: targeting sequence/synthetic sequence
gaattcccccaggaggagtttgatgataaacagttccagaaggctcaagccatctctgtc

SEQ ID NO: 4182 - DNA, 60 bp, Artificial Sequence
  Description of Artificial Sequence: targeting sequence/synthetic sequence
ctggacggcgagatgcactacttcagccccgagaccggcaaggccttcaagggcctgaac

SEQ ID NO: 4183 - DNA, 60 bp, Artificial Sequence
  Description of Artificial Sequence: targeting sequence/synthetic sequence
tccatggaccccggctccacccctcctagctgctgcgtgcccaccaaactgactcccatc

SEQ ID NO: 4184 - DNA, 60 bp, Artificial Sequence
  Description of Artificial Sequence: targeting sequence/synthetic sequence
gaggcacagaccactcaacccacagccacggaggcacagaccactccactggcagccatg

SEQ ID NO: 4185 - DNA, 60 bp, Artificial Sequence
  Description of Artificial Sequence: targeting sequence/synthetic sequence
catgcctttgagagcagtcagaaatataaggaaggaaaattcatcattgaccttgctcat

SEQ ID NO: 4186 - DNA, 60 bp, Artificial Sequence
  Description of Artificial Sequence: targeting sequence/synthetic sequence
agcctgctcatcgaggagtactcagtcacacagaccacactggaccaggtgtttgtaaat

SEQ ID NO: 4187 - DNA, 60 bp, Artificial Sequence
  Description of Artificial Sequence: targeting sequence/synthetic sequence
ggtctgttactttcccaagctctaccagcaccaccaggggctctaccccttgcccccagc

SEQ ID NO: 4188 - DNA, 60 bp, Artificial Sequence
  Description of Artificial Sequence: targeting sequence/synthetic sequence
acatccctggagcccctccaggagagcccccgtcccacaggtgtctggaagtcccgggag

SEQ ID NO: 4189 - DNA, 60 bp, Artificial Sequence
  Description of Artificial Sequence: targeting sequence/synthetic sequence
tcagaggacatgctgggtcgggttttcaatggctccggcaagcccattgacaaggggcca

SEQ ID NO: 4190 - DNA, 60 bp, Artificial Sequence
  Description of Artificial Sequence: targeting sequence/synthetic sequence
ggcccttgcgacccatgccaaggcgctttacctgacccgagtcggagttgccgcgtgaat

SEQ ID NO: 4191 - DNA, 60 bp, Artificial Sequence
  Description of Artificial Sequence: targeting sequence/synthetic sequence
accgcccccgtgcccaccatcccccctctggacaccaagatcgacctgcagagcgacccc

SEQ ID NO: 4192 - DNA, 60 bp, Artificial Sequence
  Description of Artificial Sequence: targeting sequence/synthetic sequence
ggcgcagatggtgttgctggtcccaagggtcccgctggtgaacgtggttctcctggccct

SEQ ID NO: 4193 - DNA, 60 bp, Artificial Sequence
  Description of Artificial Sequence: targeting sequence/synthetic sequence
cagccccagaacgtggacagcgtgtgcagcggcaccctgcagaagaccgaggacgtgcac

SEQ ID NO: 4194 - DNA, 60 bp, Artificial Sequence
  Description of Artificial Sequence: targeting sequence/synthetic sequence
cctggccctgttggtgttcaaggaccccctggccctgctggagaggaaggaaagcgagga

SEQ ID NO: 4195 - DNA, 60 bp, Artificial Sequence
  Description of Artificial Sequence: targeting sequence/synthetic sequence
aacggcaacggcgaccccaacaatatggacaaggccatcaagctgtacaagaaactgaag

SEQ ID NO: 4196 - DNA, 60 bp, Artificial Sequence
  Description of Artificial Sequence: targeting sequence/synthetic sequence
aacaagaagacccgtatcatcccgcgtcacctccaactggccatccgcaacgacgaggag

SEQ ID NO: 4197 - DNA, 60 bp, Artificial Sequence
  Description of Artificial Sequence: targeting sequence/synthetic sequence
ccccctggccgagatggcatccctggacagcctggacttcccggaccccccggacccccc

SEQ ID NO: 4198 - DNA, 60 bp, Artificial Sequence
  Description of Artificial Sequence: targeting sequence/synthetic sequence
aacggcaacggcgaccccaacaatatggaccgggccgtgaagctgtaccggaagctgaag

SEQ ID NO: 4199 - DNA, 60 bp, Artificial Sequence
  Description of Artificial Sequence: targeting sequence/synthetic sequence
ctggagcccctccaggagagcccccgtcccacaggtgtctggaagtcccgggaggtagcc

SEQ ID NO: 4200 - DNA, 60 bp, Artificial Sequence
  Description of Artificial Sequence: targeting sequence/synthetic sequence
gacaagagcatcgacttcagcatcagcctggtgagcaagaaccaggtgaaggtgaacggc

SEQ ID NO: 4201 - DNA, 60 bp, Artificial Sequence
  Description of Artificial Sequence: targeting sequence/synthetic sequence
gtgcctcccgcccccgccgcttctgctgctcctgagaaacctttagctggcaagaaggca

SEQ ID NO: 4202 - DNA, 60 bp, Artificial Sequence
  Description of Artificial Sequence: targeting sequence/synthetic sequence
cccatttcagattctgaagaactctcagccaaaaaaaggaaaaagagtagctcagaggct

SEQ ID NO: 4203 - DNA, 60 bp, Artificial Sequence
  Description of Artificial Sequence: targeting sequence/synthetic sequence
gaagcatttgatgcaacaatctctattaaaagttatcctgataaaaaatttagttactcc

SEQ ID NO: 4204 - DNA, 60 bp, Artificial Sequence
  Description of Artificial Sequence: targeting sequence/synthetic sequence
ctggccgcgcttaagaaagcgcttgcggctgccggctacgatgtagaaaaaaacaacagc

SEQ ID NO: 4205 - DNA, 60 bp, Artificial Sequence
  Description of Artificial Sequence: targeting sequence/synthetic sequence
gaactgctctcaaacctgggccacccggagagccccccacggaaacggctgaagagcaaa

SEQ ID NO: 4206 - DNA, 60 bp, Artificial Sequence
  Description of Artificial Sequence: targeting sequence/synthetic sequence
ctctcaaacctgggccacccggagagccccccacggaaacggctgaagagcaaagggagt

SEQ ID NO: 4207 - DNA, 60 bp, Artificial Sequence
  Description of Artificial Sequence: targeting sequence/synthetic sequence
ttaaagagaaggaatgtaccacatgaagatatctgtgaagactctgatatagatggtgat

SEQ ID NO: 4208 - DNA, 60 bp, Artificial Sequence
  Description of Artificial Sequence: targeting sequence/synthetic sequence
ctgttactttcccaagctctaccagcaccaccaggggctctaccccttgcccccagctca

SEQ ID NO: 4209 - DNA, 60 bp, Artificial Sequence
  Description of Artificial Sequence: targeting sequence/synthetic sequence
cggcagaagcggagcctgaccacaagccccgtggacatcagcatcattgacagcgtgaac

SEQ ID NO: 4210 - DNA, 60 bp, Artificial Sequence
  Description of Artificial Sequence: targeting sequence/synthetic sequence
aatgggaaggtgacgaatgaggggaccacatctacgctgacaatgaatcctgttagtttt

SEQ ID NO: 4211 - DNA, 60 bp, Artificial Sequence
  Description of Artificial Sequence: targeting sequence/synthetic sequence
gacagacatgactttggacttccccaggaggagtttgatggcaaccagttccagaagact

SEQ ID NO: 4212 - DNA, 60 bp, Artificial Sequence
  Description of Artificial Sequence: targeting sequence/synthetic sequence
taccccgaccccggcgccgctgccgctgccccccctgccgctcgggtgcccgacaccctg

SEQ ID NO: 4213 - DNA, 60 bp, Artificial Sequence
  Description of Artificial Sequence: targeting sequence/synthetic sequence
ttgcgtgacaacatccagggcatcaccaagccggccatccggcgtctggcccggcgtggc

SEQ ID NO: 4214 - DNA, 60 bp, Artificial Sequence
  Description of Artificial Sequence: targeting sequence/synthetic sequence
ccatggagtccccggcccctggaggccacagccccgacagccccgcagccccctctgctc

SEQ ID NO: 4215 - DNA, 60 bp, Artificial Sequence
  Description of Artificial Sequence: targeting sequence/synthetic sequence
ggcgccgctagcatcaccctgaccgtgcaggcccggagactgctcagcggcatcgtgcag

SEQ ID NO: 4216 - DNA, 60 bp, Artificial Sequence
  Description of Artificial Sequence: targeting sequence/synthetic sequence
cccctccaggagagcccccgtcccacaggtgtctggaagtcccgggaggtagccaccgag

SEQ ID NO: 4217 - DNA, 60 bp, Artificial Sequence
  Description of Artificial Sequence: targeting sequence/synthetic sequence
tctttggttgcgctcaagaaggcattggccgctgctggctacgacgtagagaagaataac

SEQ ID NO: 4218 - DNA, 60 bp, Artificial Sequence
  Description of Artificial Sequence: targeting sequence/synthetic sequence
tacaacatcagcgtgaccgaccccagcggcaagagcctgctcctggacccccctaccaac

SEQ ID NO: 4219 - DNA, 60 bp, Artificial Sequence
  Description of Artificial Sequence: targeting sequence/synthetic sequence
gaacatctcttaaagagaaggaatgtaccacatgaagatatctgtgaagactctgatata

SEQ ID NO: 4220 - DNA, 60 bp, Artificial Sequence
  Description of Artificial Sequence: targeting sequence/synthetic sequence
atgaactccatggaccccggctccacccctcctagctgctgcgtgcccaccaaactgact

SEQ ID NO: 4221 - DNA, 60 bp, Artificial Sequence
  Description of Artificial Sequence: targeting sequence/synthetic sequence
atcaacctggacgtgcggaagcagtacaagcgggacatccagaacatcgacgccctgctc

SEQ ID NO: 4222 - DNA, 60 bp, Artificial Sequence
  Description of Artificial Sequence: targeting sequence/synthetic sequence
gctgatggctctcctggcaaagatggcgtccgtggtctgaccggccccattggtcctcct

SEQ ID NO: 4223 - DNA, 60 bp, Artificial Sequence
  Description of Artificial Sequence: targeting sequence/synthetic sequence
atggctgaaggtattgatattggggagatgccttcatatgatctggtgctgtccaaacct

SEQ ID NO: 4224 - DNA, 60 bp, Artificial Sequence
  Description of Artificial Sequence: targeting sequence/synthetic sequence
gatttccaacccgcagcagcttcagagaccaactgggaatctgtcacaagctctatttca

SEQ ID NO: 4225 - DNA, 60 bp, Artificial Sequence
  Description of Artificial Sequence: targeting sequence/synthetic sequence
cacgtgaaggagaaggagaagaacaaggacgagaacaagcggaaggacgaggaacggaac

SEQ ID NO: 4226 - DNA, 60 bp, Artificial Sequence
  Description of Artificial Sequence: targeting sequence/synthetic sequence
ggtgactctgatggcaagcatgagactgtgaaccaggaagagaagagtggcccaggtgca

SEQ ID NO: 4227 - DNA, 60 bp, Artificial Sequence
  Description of Artificial Sequence: targeting sequence/synthetic sequence
gctgaaggtattgatattggggagatgccttcatatgatctggtgctgtccaaaccttcc

SEQ ID NO: 4228 - DNA, 60 bp, Artificial Sequence
  Description of Artificial Sequence: targeting sequence/synthetic sequence
ccagccacagaccatgtcatcaggagagaaactgagaccaccttctctgggagccactcc

SEQ ID NO: 4229 - DNA, 60 bp, Artificial Sequence
  Description of Artificial Sequence: targeting sequence/synthetic sequence
tcaaagtccgctcctgccccgaagaaaggctccaagaaggcagtgacaaaggcccagaag

SEQ ID NO: 4230 - DNA, 60 bp, Artificial Sequence
  Description of Artificial Sequence: targeting sequence/synthetic sequence
gaagaaaccaaacagggtaatcttgaaagagaatgcatcgaagaactgtgcaataaagaa

SEQ ID NO: 4231 - DNA, 60 bp, Artificial Sequence
  Description of Artificial Sequence: targeting sequence/synthetic sequence
acagtgcctcccgcccccgccgcttctgctgctcctgagaaacctttagctggcaagaag

SEQ ID NO: 4232 - DNA, 60 bp, Artificial Sequence
  Description of Artificial Sequence: targeting sequence/synthetic sequence
atggaggttgatggtaaggtagagtcaattatgaagaggacagctttggtagccaatacc

SEQ ID NO: 4233 - DNA, 60 bp, Artificial Sequence
  Description of Artificial Sequence: targeting sequence/synthetic sequence
ttcctggtggtcttcgaggacgtgaagggcaccggcggagagagccgggacctgcccagc

SEQ ID NO: 4234 - DNA, 60 bp, Artificial Sequence
  Description of Artificial Sequence: targeting sequence/synthetic sequence
cagggcgtggtcgaccggggctggggcaacggctgcggcctgttcggcaagggcagcatc

SEQ ID NO: 4235 - DNA, 60 bp, Artificial Sequence
  Description of Artificial Sequence: targeting sequence/synthetic sequence
cccagccaggatgtgactgtgccctgcccagttcccccacctcccccatgctgccacccc

SEQ ID NO: 4236 - DNA, 60 bp, Artificial Sequence
  Description of Artificial Sequence: targeting sequence/synthetic sequence
gaccgtggtgagcctggtccccccggccctgctggctttgctggcccccctggtgctgac

SEQ ID NO: 4237 - DNA, 60 bp, Artificial Sequence
  Description of Artificial Sequence: targeting sequence/synthetic sequence
gagtttgaagaaacctatatcccaaaggaccagaagtattcattcctgcatgactcccag

SEQ ID NO: 4238 - DNA, 60 bp, Artificial Sequence
  Description of Artificial Sequence: targeting sequence/synthetic sequence
acatactttcgatttcaggaggaaataaaagaaaacacaaagaacgacaaacaaatggtc

SEQ ID NO: 4239 - DNA, 60 bp, Artificial Sequence
  Description of Artificial Sequence: targeting sequence/synthetic sequence
cagggagaccagctatccacccacacagatggcatcccccacctagtcctcagccctagt

SEQ ID NO: 4240 - DNA, 60 bp, Artificial Sequence
  Description of Artificial Sequence: targeting sequence/synthetic sequence
ggcgacgagaccctgcagaagtaccagagctccaacgcccagcggagctccgagttcaag

SEQ ID NO: 4241 - DNA, 60 bp, Artificial Sequence
  Description of Artificial Sequence: targeting sequence/synthetic sequence
ggcgccgctgccgctgccccccctgccgctcgggtgcccgacaccctgatgcagagcctg

SEQ ID NO: 4242 - DNA, 60 bp, Artificial Sequence
  Description of Artificial Sequence: targeting sequence/synthetic sequence
tacgagcatgcctttgagagcagtcagaaatataaggaaggaaaattcatcattgacctt

SEQ ID NO: 4243 - DNA, 60 bp, Artificial Sequence
  Description of Artificial Sequence: targeting sequence/synthetic sequence
aaggacggcagcgtgaccctgcccacccagcccgtgcaggagttcctgctcagcggccac

SEQ ID NO: 4244 - DNA, 60 bp, Artificial Sequence
  Description of Artificial Sequence: targeting sequence/synthetic sequence
ctggccccagggcccctggggcgggggaccatgccaggaaagtttccccacagtgacaag

SEQ ID NO: 4245 - DNA, 60 bp, Artificial Sequence
  Description of Artificial Sequence: targeting sequence/synthetic sequence
gaccagttcctggtggtcttcgaggacgtgaagggcaccggcggagagagccgggacctg

SEQ ID NO: 4246 - DNA, 60 bp, Artificial Sequence
  Description of Artificial Sequence: targeting sequence/synthetic sequence
tatcaggatattgcctggtttgatgaaaaggaaaacagcacaggaggcttgacaacaata

SEQ ID NO: 4247 - DNA, 60 bp, Artificial Sequence
  Description of Artificial Sequence: targeting sequence/synthetic sequence
acaccggtgtctgaggatatgcttggtcgggtattcaatggatcgggaaaacccattgac

SEQ ID NO: 4248 - DNA, 60 bp, Artificial Sequence
  Description of Artificial Sequence: targeting sequence/synthetic sequence
aatctggccccagggcccctggggcgggggaccatgccaggaaagtttccccacagtgac

SEQ ID NO: 4249 - DNA, 60 bp, Artificial Sequence
  Description of Artificial Sequence: targeting sequence/synthetic sequence
cctacccctggggaccccatgctggcctcatggcccactggggaagtgtggctaagcacg

SEQ ID NO: 4250 - DNA, 60 bp, Artificial Sequence
  Description of Artificial Sequence: targeting sequence/synthetic sequence
caggacgtggacagcgtgtgcagcggcaccctgcagaagaccgaggacgtgcacctgatg

SEQ ID NO: 4251 - DNA, 60 bp, Artificial Sequence
  Description of Artificial Sequence: targeting sequence/synthetic sequence
tcacccacccggaaccctgaggtgagaacgcccaagtcagcaactcagccacaaacaaca

SEQ ID NO: 4252 - DNA, 60 bp, Artificial Sequence
  Description of Artificial Sequence: targeting sequence/synthetic sequence
gctgaactgcaagcggcggctgccgagctgcgaagcctcccgggtctgcctccggccaca

SEQ ID NO: 4253 - DNA, 60 bp, Artificial Sequence
  Description of Artificial Sequence: targeting sequence/synthetic sequence
tacactgaagcatttgatgcaacaatctctattaaaagttatcctgataaaaaatttagt

SEQ ID NO: 4254 - DNA, 60 bp, Artificial Sequence
  Description of Artificial Sequence: targeting sequence/synthetic sequence
catcagcagaagaaacacagcggttttgaagatgaactctcagaggttcttgagaaccag

SEQ ID NO: 4255 - DNA, 60 bp, Artificial Sequence
  Description of Artificial Sequence: targeting sequence/synthetic sequence
acaaagagaagtgggcaagttctggaagttagtggttccaaggcagtagttcaggtattt

SEQ ID NO: 4256 - DNA, 60 bp, Artificial Sequence
  Description of Artificial Sequence: targeting sequence/synthetic sequence
tctaaacacagtgatgattcagtagccatgaagcattttaagtctcctacaaaagaaagc

SEQ ID NO: 4257 - DNA, 60 bp, Artificial Sequence
  Description of Artificial Sequence: targeting sequence/synthetic sequence
cccagcctttttgttacaaaagaaggaacaaatgatggttggaagaatgcggctcatatt

SEQ ID NO: 4258 - DNA, 60 bp, Artificial Sequence
  Description of Artificial Sequence: targeting sequence/synthetic sequence
tctccttcctcctgtctgatggacagacatgactttggatttccccaggaggagtttgat

SEQ ID NO: 4259 - DNA, 60 bp, Artificial Sequence
  Description of Artificial Sequence: targeting sequence/synthetic sequence
ggcagccccggttcagcctcggacttggaaacgtccgggttacaggagcagcgcaaccat

SEQ ID NO: 4260 - DNA, 60 bp, Artificial Sequence
  Description of Artificial Sequence: targeting sequence/synthetic sequence
aagctggacgcctgggagcagatccggctgaagcccggcagcaagaaaaagtaccggctg

SEQ ID NO: 4261 - DNA, 60 bp, Artificial Sequence
  Description of Artificial Sequence: targeting sequence/synthetic sequence
gacaccacctcccaggagcctcccgacaccacctccccggagcctcccgacaagacctcc

SEQ ID NO: 4262 - DNA, 60 bp, Artificial Sequence
  Description of Artificial Sequence: targeting sequence/synthetic sequence
gtttctctggccgcgcttaagaaagcgcttgcggctgccggctacgatgtagaaaaaaac

SEQ ID NO: 4263 - DNA, 60 bp, Artificial Sequence
  Description of Artificial Sequence: targeting sequence/synthetic sequence
atccccggcttcagcctgttcggcgacgagaccctgcagcaataccagagctccaacacc

SEQ ID NO: 4264 - DNA, 60 bp, Artificial Sequence
  Description of Artificial Sequence: targeting sequence/synthetic sequence
gatatgcttggtcgggtattcaatggatcgggaaaacccattgacagaggtcctgttgta

SEQ ID NO: 4265 - DNA, 60 bp, Artificial Sequence
  Description of Artificial Sequence: targeting sequence/synthetic sequence
gtggtgccccacgagtacatgctgtcaatctacaggacttactccatcgctgagaagctg

SEQ ID NO: 4266 - DNA, 60 bp, Artificial Sequence
  Description of Artificial Sequence: targeting sequence/synthetic sequence
aaggagtacctgatgtacagcgccctgacccgggaccccttcagcgtgatcgaggaaagc

SEQ ID NO: 4267 - DNA, 60 bp, Artificial Sequence
  Description of Artificial Sequence: targeting sequence/synthetic sequence
accgtggcacgagcccgagagtctggcaaggccatcatcatcacctcccacagcatggag

SEQ ID NO: 4268 - DNA, 60 bp, Artificial Sequence
  Description of Artificial Sequence: targeting sequence/synthetic sequence
ctgaccggcagcaagctggacgcctgggagcagatccggctgaagcccggcagcaagaaa

SEQ ID NO: 4269 - DNA, 60 bp, Artificial Sequence
  Description of Artificial Sequence: targeting sequence/synthetic sequence
ttggcagctcttaaaaaggcgctggcggccgcaggctacgacgtggagaagaacaacagc

SEQ ID NO: 4270 - DNA, 60 bp, Artificial Sequence
  Description of Artificial Sequence: targeting sequence/synthetic sequence
gacacggccaagagtccccaccgcaccaagttcaccctgtccctcgacgtccccaccaac

SEQ ID NO: 4271 - DNA, 60 bp, Artificial Sequence
  Description of Artificial Sequence: targeting sequence/synthetic sequence
gaggtggagacctacgtgctgagcatcgtgcccagcggccccctgaaggcccagatcgcc

SEQ ID NO: 4272 - DNA, 60 bp, Artificial Sequence
  Description of Artificial Sequence: targeting sequence/synthetic sequence
gtggtcgagcggcagaagcggagcctgaccacaagccccgtggacatcagcatcattgac

SEQ ID NO: 4273 - DNA, 60 bp, Artificial Sequence
  Description of Artificial Sequence: targeting sequence/synthetic sequence
aagagaagtgggcaagttctggaagttagtggttccaaggcagtagttcaggtatttgaa

SEQ ID NO: 4274 - DNA, 60 bp, Artificial Sequence
  Description of Artificial Sequence: targeting sequence/synthetic sequence
agtctttctgccacagatattgaagttttctgggcctccccactggagaagaatagagga

SEQ ID NO: 4275 - DNA, 60 bp, Artificial Sequence
  Description of Artificial Sequence: targeting sequence/synthetic sequence
gacaccgtggcacgagcccgagagtctggcaaggccatcatcatcacctcccacagcatg

SEQ ID NO: 4276 - DNA, 60 bp, Artificial Sequence
  Description of Artificial Sequence: targeting sequence/synthetic sequence
ggccccattcctccagttctccctgttcctcctggctttcctcctggacctcaaattccg

SEQ ID NO: 4277 - DNA, 60 bp, Artificial Sequence
  Description of Artificial Sequence: targeting sequence/synthetic sequence
caaggaccacctgagcgtgacctctgtggctgctacagcgtgtccagtgtcctgcctggc

SEQ ID NO: 4278 - DNA, 60 bp, Artificial Sequence
  Description of Artificial Sequence: targeting sequence/synthetic sequence
ggcgtgaacaaggagtacctgatgtacagcgccctgacccgggaccccttcagcgtgatc

SEQ ID NO: 4279 - DNA, 60 bp, Artificial Sequence
  Description of Artificial Sequence: targeting sequence/synthetic sequence
ctcaaagtaaagcgtatcactccgcgtcacttgcagcttgcaatccgtggtgatgaagag

SEQ ID NO: 4280 - DNA, 60 bp, Artificial Sequence
  Description of Artificial Sequence: targeting sequence/synthetic sequence
gatcacttggagaaactatttaagatggatgaagcaagtgcccagctccttgcttataag

SEQ ID NO: 4281 - DNA, 60 bp, Artificial Sequence
  Description of Artificial Sequence: targeting sequence/synthetic sequence
aaggacagcctgctcatcgaggagtactcagtcacacagaccacactggaccaggtgttt

SEQ ID NO: 4282 - DNA, 60 bp, Artificial Sequence
  Description of Artificial Sequence: targeting sequence/synthetic sequence
acctaccaggagtttgaagaaacctatatcccaaaggaccagaagtattcattcctgcat

SEQ ID NO: 4283 - DNA, 60 bp, Artificial Sequence
  Description of Artificial Sequence: targeting sequence/synthetic sequence
agccctacccctggggaccccatgctggcctcatggcccactggggaagtgtggctaagc

SEQ ID NO: 4284 - DNA, 60 bp, Artificial Sequence
  Description of Artificial Sequence: targeting sequence/synthetic sequence
tttggatcctcagatcacttggagaaactatttaagatggatgaagcaagtgcccagctc

SEQ ID NO: 4285 - DNA, 60 bp, Artificial Sequence
  Description of Artificial Sequence: targeting sequence/synthetic sequence
gccaacctgatcattttcggccccggccccgtgctgaacgagaacgagaccatcgacatc

SEQ ID NO: 4286 - DNA, 60 bp, Artificial Sequence
  Description of Artificial Sequence: targeting sequence/synthetic sequence
cagaagtcgaccgagctgctcatccggaagctgcccttccagaggttggtgagggagatc

SEQ ID NO: 4287 - DNA, 60 bp, Artificial Sequence
  Description of Artificial Sequence: targeting sequence/synthetic sequence
tccgcgccccgcagccctgccccccgcgaaggccccccgcctgtcctggcgtcccccgcc

SEQ ID NO: 4288 - DNA, 60 bp, Artificial Sequence
  Description of Artificial Sequence: targeting sequence/synthetic sequence
cctccaggatttaccggaccaccaggtcccccaggccctcccggccctccaggtgaaaag

SEQ ID NO: 4289 - DNA, 60 bp, Artificial Sequence
  Description of Artificial Sequence: targeting sequence/synthetic sequence
cggaaccctgaggtgagaacgcccaagtcagcaactcagccacaaacaacagaaactaat

SEQ ID NO: 4290 - DNA, 60 bp, Artificial Sequence
  Description of Artificial Sequence: targeting sequence/synthetic sequence
gacagcctgctcatcgaggagtactcagtcacacagaccacactggaccaggtgtttgta

SEQ ID NO: 4291 - DNA, 60 bp, Artificial Sequence
  Description of Artificial Sequence: targeting sequence/synthetic sequence
ggcgagctggacaagtgggagaagatccggctgcggcccggcggaaagaaacagtaccgg

SEQ ID NO: 4292 - DNA, 60 bp, Artificial Sequence
  Description of Artificial Sequence: targeting sequence/synthetic sequence
ggacagcctggacttcccggaccccccggaccccccggacctcccggaccccctggcctc

SEQ ID NO: 4293 - DNA, 60 bp, Artificial Sequence
  Description of Artificial Sequence: targeting sequence/synthetic sequence
ggctctcctggcaaagatggcgtccgtggtctgaccggccccattggtcctcctggccct

SEQ ID NO: 4294 - DNA, 60 bp, Artificial Sequence
  Description of Artificial Sequence: targeting sequence/synthetic sequence
gtgggcatgcacgtgaaggagaaggagaagaacaaggacgagaacaagcggaaggacgag

SEQ ID NO: 4295 - DNA, 60 bp, Artificial Sequence
  Description of Artificial Sequence: targeting sequence/synthetic sequence
cctgttgggcctccaggatttaccggaccaccaggtcccccaggccctcccggccctcca

SEQ ID NO: 4296 - DNA, 60 bp, Artificial Sequence
  Description of Artificial Sequence: targeting sequence/synthetic sequence
cagaacaataactggctgaagaaattcaccgagatgaccaacgcctgcaagggcatggag

SEQ ID NO: 4297 - DNA, 60 bp, Artificial Sequence
  Description of Artificial Sequence: targeting sequence/synthetic sequence
gagctgctgattcgcaaactgccattccagcgtctagtccgtgagatcgcgcaggacttc

SEQ ID NO: 4298 - DNA, 60 bp, Artificial Sequence
  Description of Artificial Sequence: targeting sequence/synthetic sequence
gacgccgcgcttcgggctggcagcagggggctctccgacccgtgggcagactcagtggga

SEQ ID NO: 4299 - DNA, 60 bp, Artificial Sequence
  Description of Artificial Sequence: targeting sequence/synthetic sequence
tccttcccttcacccacccggaaccctgaggtgagaacgcccaagtcagcaactcagcca

SEQ ID NO: 4300 - DNA, 60 bp, Artificial Sequence
  Description of Artificial Sequence: targeting sequence/synthetic sequence
gtggagcggcagaagcggagcctgaccacaagccccgtggacatcagcatcattgacagc

SEQ ID NO: 4301 - DNA, 60 bp, Artificial Sequence
  Description of Artificial Sequence: targeting sequence/synthetic sequence
cggggctccctgggtgactctgatggcaagcatgagactgtgaaccaggaagagaagagt

SEQ ID NO: 4302 - DNA, 60 bp, Artificial Sequence
  Description of Artificial Sequence: targeting sequence/synthetic sequence
tatgctgagcgggtcggggccggcgcgccggtgtacctggcggcggtgctggagtacctg

SEQ ID NO: 4303 - DNA, 60 bp, Artificial Sequence
  Description of Artificial Sequence: targeting sequence/synthetic sequence
gggcctccaggatttaccggaccaccaggtcccccaggccctcccggccctccaggtgaa

SEQ ID NO: 4304 - DNA, 60 bp, Artificial Sequence
  Description of Artificial Sequence: targeting sequence/synthetic sequence
ctttatgagatgctgagtgaccactcgatccgctcctttgatgatctccaacgcctgctg

SEQ ID NO: 4305 - DNA, 60 bp, Artificial Sequence
  Description of Artificial Sequence: targeting sequence/synthetic sequence
gagtggaaggagctcacttaccaggaagtcctcagcttcaagcccccagagccaccgaag

SEQ ID NO: 4306 - DNA, 60 bp, Artificial Sequence
  Description of Artificial Sequence: targeting sequence/synthetic sequence
cttggccccattcctccagttctccctgttcctcctggctttcctcctggacctcaaatt

SEQ ID NO: 4307 - DNA, 60 bp, Artificial Sequence
  Description of Artificial Sequence: targeting sequence/synthetic sequence
ggcttcagcctgttcggcgacgagaccctgcagaagtaccagagctccaacgcccagcgg

SEQ ID NO: 4308 - DNA, 60 bp, Artificial Sequence
  Description of Artificial Sequence: targeting sequence/synthetic sequence
tctgaaacagtgcctcccgcccccgccgcttctgctgctcctgagaaacctttagctggc

SEQ ID NO: 4309 - DNA, 60 bp, Artificial Sequence
  Description of Artificial Sequence: targeting sequence/synthetic sequence
atcacaccccacgagtacatgctctcgctgtacaggacgctgtccgatgctgacagaaag

SEQ ID NO: 4310 - DNA, 60 bp, Artificial Sequence
  Description of Artificial Sequence: targeting sequence/synthetic sequence
gaacctgctaagtccgctcctgccccaaagaagggctccaagaaggcggtgactaaggct

SEQ ID NO: 4311 - DNA, 60 bp, Artificial Sequence
  Description of Artificial Sequence: targeting sequence/synthetic sequence
aacgacagctggctgaagaaattcaccgagatgaccaacgcctgcaagcggatggagtgg

SEQ ID NO: 4312 - DNA, 60 bp, Artificial Sequence
  Description of Artificial Sequence: targeting sequence/synthetic sequence
gaggagctgctgaggtggagcactgtgcctgtgcctcccctagagcctgctaggcccaac

SEQ ID NO: 4313 - DNA, 60 bp, Artificial Sequence
  Description of Artificial Sequence: targeting sequence/synthetic sequence
acggtggtagtagcattccgggagctggtggagccaaggaaacaggatgctgatagtctc

SEQ ID NO: 4314 - DNA, 60 bp, Artificial Sequence
  Description of Artificial Sequence: targeting sequence/synthetic sequence
gtgctgcgcgacaacatccagggtatcaccaagccagccattcggcgccttgctcgccgc

SEQ ID NO: 4315 - DNA, 60 bp, Artificial Sequence
  Description of Artificial Sequence: targeting sequence/synthetic sequence
gtgactgtgccctgcccagttcccccacctcccccatgctgccacccccgactgtcgctg

SEQ ID NO: 4316 - DNA, 60 bp, Artificial Sequence
  Description of Artificial Sequence: targeting sequence/synthetic sequence
cagccgccacccccgccacccggatccccgggtggctcgcaggacacctgtacgtcgtgc

SEQ ID NO: 4317 - DNA, 60 bp, Artificial Sequence
  Description of Artificial Sequence: targeting sequence/synthetic sequence
agcttcctgaccgaggtggagacctacgtgctgagcatcattcccagcggccccctgaag

SEQ ID NO: 4318 - DNA, 60 bp, Artificial Sequence
  Description of Artificial Sequence: targeting sequence/synthetic sequence
agtgtgccaattgagtcccaacccccaccctcaacattgcccccttttctggcccctgag

SEQ ID NO: 4319 - DNA, 60 bp, Artificial Sequence
  Description of Artificial Sequence: targeting sequence/synthetic sequence
ttcgtgtgccagtgccccgagggcttcgccggcaagtgctgtgagatcgacacccgggcc

SEQ ID NO: 4320 - DNA, 60 bp, Artificial Sequence
  Description of Artificial Sequence: targeting sequence/synthetic sequence
ccagaacccagcactgctccaagcacctccttcctgctcccaatgggccccagcccccca

SEQ ID NO: 4321 - DNA, 60 bp, Artificial Sequence
  Description of Artificial Sequence: targeting sequence/synthetic sequence
cccggcttcagcctgttcggcgacgagaccctgcagcaataccagagctccaacacccag

SEQ ID NO: 4322 - DNA, 60 bp, Artificial Sequence
  Description of Artificial Sequence: targeting sequence/synthetic sequence
caaggaccacctgaccgtgacctctgtggctgctacagcgtgtccagtgtcctgtcgggc

SEQ ID NO: 4323 - DNA, 60 bp, Artificial Sequence
  Description of Artificial Sequence: targeting sequence/synthetic sequence
agcgcccagccccccacctcagaggctgcagtgaaccaaatggagcctccgttggccatg

SEQ ID NO: 4324 - DNA, 60 bp, Artificial Sequence
  Description of Artificial Sequence: targeting sequence/synthetic sequence
cgggaccagagcgaccggggctggggcaaccactgcggcctgttcggcaagggcagcatc

SEQ ID NO: 4325 - DNA, 60 bp, Artificial Sequence
  Description of Artificial Sequence: targeting sequence/synthetic sequence
gcgccccgcagccctgccccccgcgaaggccccccgcctgtcctggcgtcccccgccggc

SEQ ID NO: 4326 - DNA, 60 bp, Artificial Sequence
  Description of Artificial Sequence: targeting sequence/synthetic sequence
ttgaaggacagacatgaattcagattcccagaggaggagtttgatggccaccagttccag

SEQ ID NO: 4327 - DNA, 60 bp, Artificial Sequence
  Description of Artificial Sequence: targeting sequence/synthetic sequence
cgctcgctgctcgggggccactacgacccaggcttcatggccacctcgccccccgaggac

SEQ ID NO: 4328 - DNA, 60 bp, Artificial Sequence
  Description of Artificial Sequence: targeting sequence/synthetic sequence
atgggcgcccggagcctgaccctgaccgtgcaggcccggcagctgctcagcggcatcgtg

SEQ ID NO: 4329 - DNA, 60 bp, Artificial Sequence
  Description of Artificial Sequence: targeting sequence/synthetic sequence
ccccccacctcagaggctgcagtgaaccaaatggagcctccgttggccatggcagtcaca

SEQ ID NO: 4330 - DNA, 60 bp, Artificial Sequence
  Description of Artificial Sequence: targeting sequence/synthetic sequence
acagatattgaagttttctgggcctccccactggagaagaatagaggacgaatacaaggt

SEQ ID NO: 4331 - DNA, 60 bp, Artificial Sequence
  Description of Artificial Sequence: targeting sequence/synthetic sequence
caaattataaagccatttattctcagaagagtaaaagaagaggttctcaagcagttaccc

SEQ ID NO: 4332 - DNA, 60 bp, Artificial Sequence
  Description of Artificial Sequence: targeting sequence/synthetic sequence
gacctggaccccagctccatccccgacaaggagcaggccatcagcgccctgcccgactac

SEQ ID NO: 4333 - DNA, 60 bp, Artificial Sequence
  Description of Artificial Sequence: targeting sequence/synthetic sequence
ggctggggcaaccactgcggcctgttcggcaagggcagcatcgtgacctgcgtgaaggcc

SEQ ID NO: 4334 - DNA, 60 bp, Artificial Sequence
  Description of Artificial Sequence: targeting sequence/synthetic sequence
atggaggcacagaccactcaaaccacagccatggaggcacagaccactgcaccagaagcc

SEQ ID NO: 4335 - DNA, 60 bp, Artificial Sequence
  Description of Artificial Sequence: targeting sequence/synthetic sequence
tggggcaaccactgcggcctgttcggcaagggcagcatcgtggcctgcgtgaaggccgct

SEQ ID NO: 4336 - DNA, 60 bp, Artificial Sequence
  Description of Artificial Sequence: targeting sequence/synthetic sequence
ccacccccgccacccggatccccgggtggctcgcaggacacctgtacgtcgtgcggcggc

SEQ ID NO: 4337 - DNA, 60 bp, Artificial Sequence
  Description of Artificial Sequence: targeting sequence/synthetic sequence
gccacagaccatgtcatcaggagagaaactgagaccaccttctctgggagccactcctgt

SEQ ID NO: 4338 - DNA, 60 bp, Artificial Sequence
  Description of Artificial Sequence: targeting sequence/synthetic sequence
aagacgcgcatcatcccgcgccacctgcagctggccatccgcaacgacgaggagctcaac

SEQ ID NO: 4339 - DNA, 60 bp, Artificial Sequence
  Description of Artificial Sequence: targeting sequence/synthetic sequence
cccattcctccagttctccctgttcctcctggctttcctcctggacctcaaattccggtc

SEQ ID NO: 4340 - DNA, 60 bp, Artificial Sequence
  Description of Artificial Sequence: targeting sequence/synthetic sequence
cccataccacggcggcacacccggagcgccgaggacgactcggagcgggaccccctgaac

SEQ ID NO: 4341 - DNA, 60 bp, Artificial Sequence
  Description of Artificial Sequence: targeting sequence/synthetic sequence
ttctcctgcctgaaggacagacatgactttggatttcctcaggaggagtttgatggcaac

SEQ ID NO: 4342 - DNA, 60 bp, Artificial Sequence
  Description of Artificial Sequence: targeting sequence/synthetic sequence
ctgagtgaccactcgatccgctcctttgatgatctccaacgcctgctgcacggagacccc

SEQ ID NO: 4343 - DNA, 60 bp, Artificial Sequence
  Description of Artificial Sequence: targeting sequence/synthetic sequence
agcgacttcgtgtgccagtgccccgagggcttcgccggcaagtgctgtgagatcgacacc

SEQ ID NO: 4344 - DNA, 60 bp, Artificial Sequence
  Description of Artificial Sequence: targeting sequence/synthetic sequence
tacgctgagcgggtcggtgccggagcgccggtgtacctggcggcggtgttggagtaccta

SEQ ID NO: 4345 - DNA, 60 bp, Artificial Sequence
  Description of Artificial Sequence: targeting sequence/synthetic sequence
gtgaccacagaggccgctttcggcctgatctgcgccacctgcgagcagatcgccgacagc

SEQ ID NO: 4346 - DNA, 60 bp, Artificial Sequence
  Description of Artificial Sequence: targeting sequence/synthetic sequence
agcatcaagatccagaagttcatcgagtggctgaaggtgaagatcctgcccgaggtgcgg

SEQ ID NO: 4347 - DNA, 60 bp, Artificial Sequence
  Description of Artificial Sequence: targeting sequence/synthetic sequence
atcaagatccagaagttcatcgagtggctgaaggtgaagatcctgcccgaggtgcgggag

SEQ ID NO: 4348 - DNA, 60 bp, Artificial Sequence
  Description of Artificial Sequence: targeting sequence/synthetic sequence
ccgccacccccgccacccggatccccgggtggctcgcaggacacctgtacgtcgtgcggc

SEQ ID NO: 4349 - DNA, 60 bp, Artificial Sequence
  Description of Artificial Sequence: targeting sequence/synthetic sequence
ccttttagtcaaattgtggtcatctgttcagctgaaggagaacccagtgctgctcccaca

SEQ ID NO: 4350 - DNA, 60 bp, Artificial Sequence
  Description of Artificial Sequence: targeting sequence/synthetic sequence
cagctatccacccacacagatggcatcccccacctagtcctcagccctagtactgtcttc

SEQ ID NO: 4351 - DNA, 60 bp, Artificial Sequence
  Description of Artificial Sequence: targeting sequence/synthetic sequence
cacacagatgatgaaatgacaggctacgtggccactaggtggtacagggctcctgagatc

SEQ ID NO: 4352 - DNA, 60 bp, Artificial Sequence
  Description of Artificial Sequence: targeting sequence/synthetic sequence
accaacctgatcattttcggccccggccccgtgctgagcgacaacttcaccgacagcatg

SEQ ID NO: 4353 - DNA, 60 bp, Artificial Sequence
  Description of Artificial Sequence: targeting sequence/synthetic sequence
ttcgccgacaaggacggcagcgtgaccctgcccacccagcccgtgcaggagttcctgctc

SEQ ID NO: 4354 - DNA, 60 bp, Artificial Sequence
  Description of Artificial Sequence: targeting sequence/synthetic sequence
attgagtcccaacccccaccctcaacattgcccccttttctggcccctgagtgggacctt

SEQ ID NO: 4355 - DNA, 60 bp, Artificial Sequence
  Description of Artificial Sequence: targeting sequence/synthetic sequence
cccccagggcctactgggcctggtggtgacaaaggagacacaggaccccctggtccacaa

SEQ ID NO: 4356 - DNA, 60 bp, Artificial Sequence
  Description of Artificial Sequence: targeting sequence/synthetic sequence
agcactgctccaagcacctccttcctgctcccaatgggccccagccccccagctgaaggg

SEQ ID NO: 4357 - DNA, 60 bp, Artificial Sequence
  Description of Artificial Sequence: targeting sequence/synthetic sequence
ctgctcgggggccactacgacccaggcttcatggccacctcgccccccgaggaccggccc

SEQ ID NO: 4358 - DNA, 60 bp, Artificial Sequence
  Description of Artificial Sequence: targeting sequence/synthetic sequence
ttctcctgcctgaaggacagacatgactttggattcccccaggaggagtttgatggcaac

SEQ ID NO: 4359 - DNA, 60 bp, Artificial Sequence
  Description of Artificial Sequence: targeting sequence/synthetic sequence
aacacccccataccacggcggcacacccggagcgccgaggacgactcggagcgggacccc

SEQ ID NO: 4360 - DNA, 60 bp, Artificial Sequence
  Description of Artificial Sequence: targeting sequence/synthetic sequence
caggacacctctgaggagctgctgaggtggagcactgtgcctgtgcctcccctagagcct

SEQ ID NO: 4361 - DNA, 60 bp, Artificial Sequence
  Description of Artificial Sequence: targeting sequence/synthetic sequence
acccggaaccctgaggtgagaacgcccaagtcagcaactcagccacaaacaacagaaact

SEQ ID NO: 4362 - DNA, 60 bp, Artificial Sequence
  Description of Artificial Sequence: targeting sequence/synthetic sequence
aaagcaggacctcctggacccaatggccctccaggacccccaggacctccaggaccccag

SEQ ID NO: 4363 - DNA, 60 bp, Artificial Sequence
  Description of Artificial Sequence: targeting sequence/synthetic sequence
cggcccctggaggccacagccccgacagccccgcagccccctctgctcctcctactgctg

SEQ ID NO: 4364 - DNA, 60 bp, Artificial Sequence
  Description of Artificial Sequence: targeting sequence/synthetic sequence
accataaatccagaagcatctgcttctccttgctgcgtgtcccaagatttagaacctcta

SEQ ID NO: 4365 - DNA, 60 bp, Artificial Sequence
  Description of Artificial Sequence: targeting sequence/synthetic sequence
agtcaaattgtggtcatctgttcagctgaaggagaacccagtgctgctcccacagatgtc

SEQ ID NO: 4366 - DNA, 60 bp, Artificial Sequence
  Description of Artificial Sequence: targeting sequence/synthetic sequence
ctgcacagcccgacctccccggagcctcccgacaccacctccccggagcctcccaacacc

SEQ ID NO: 4367 - DNA, 60 bp, Artificial Sequence
  Description of Artificial Sequence: targeting sequence/synthetic sequence
ccaaaccaatttcaaagcgacccaccagctcccagtgacaaaagcgttaagattgaggaa

SEQ ID NO: 4368 - DNA, 60 bp, Artificial Sequence
  Description of Artificial Sequence: targeting sequence/synthetic sequence
gagacgcagcccggagaggaggccctgcagccgcgggggacggagaaggaaccgccaggg

SEQ ID NO: 4369 - DNA, 60 bp, Artificial Sequence
  Description of Artificial Sequence: targeting sequence/synthetic sequence
ggagaggaggccctgcagccgcgggggacggagaaggaaccgccagggcccacgacagac

SEQ ID NO: 4370 - DNA, 60 bp, Artificial Sequence
  Description of Artificial Sequence: targeting sequence/synthetic sequence
accacagaggccgctttcggcctgatctgcgccacctgcgagcagatcgccgacagccag

SEQ ID NO: 4371 - DNA, 60 bp, Artificial Sequence
  Description of Artificial Sequence: targeting sequence/synthetic sequence
accacagagggcgccttcggcctggtgtgcgccacctgcgagcagatcgccgacagccag

SEQ ID NO: 4372 - DNA, 60 bp, Artificial Sequence
  Description of Artificial Sequence: targeting sequence/synthetic sequence
ttggagaaggagttgcgactgaaggagaccttgaaaaatcagggtgtctccaatgcagtg

SEQ ID NO: 4373 - DNA, 60 bp, Artificial Sequence
  Description of Artificial Sequence: targeting sequence/synthetic sequence
tacatgaagcacgccaccaagaccgccaaggatgcactgagcagcgtgcaggagtcccag

SEQ ID NO: 4374 - DNA, 60 bp, Artificial Sequence
  Description of Artificial Sequence: targeting sequence/synthetic sequence
gaggccgtggagcgggccatcgcccgggtggccgacaccatcagctccggccccgtgaac

SEQ ID NO: 4375 - DNA, 60 bp, Artificial Sequence
  Description of Artificial Sequence: targeting sequence/synthetic sequence
cgggtggccgacaccatcggcagcggccccagcaacagccaggccgtgcccgccctgacc

SEQ ID NO: 4376 - DNA, 60 bp, Artificial Sequence
  Description of Artificial Sequence: targeting sequence/synthetic sequence
gccagcctgagcaagcagcccaccagccagccccggggcgaccccaccggccccaaggag

SEQ ID NO: 4377 - DNA, 60 bp, Artificial Sequence
  Description of Artificial Sequence: targeting sequence/synthetic sequence
cgggtaggcttggaggccagcaacaatggcagtatgcgcaacacttcacaagatagggag

SEQ ID NO: 4378 - DNA, 60 bp, Artificial Sequence
  Description of Artificial Sequence: targeting sequence/synthetic sequence
gtggtcagccacgaggactcccggactctgctcaacgccagccggagcctagaagtcagc

SEQ ID NO: 4379 - DNA, 60 bp, Artificial Sequence
  Description of Artificial Sequence: targeting sequence/synthetic sequence
caggccttggtccgtgagatgtcaggctccccagcttctggcattcctgtcaaagtttct

SEQ ID NO: 4380 - DNA, 60 bp, Artificial Sequence
  Description of Artificial Sequence: targeting sequence/synthetic sequence
gacgtgcgtggcaacctgaggggcaacaccgaggggctgcagaagtcactggcagagctg

SEQ ID NO: 4381 - DNA, 60 bp, Artificial Sequence
  Description of Artificial Sequence: targeting sequence/synthetic sequence
cagctgcagcccagcctgcagaccggcaccgaggaaatcaagagcctgtacaacgccgtg

SEQ ID NO: 4382 - DNA, 60 bp, Artificial Sequence
  Description of Artificial Sequence: targeting sequence/synthetic sequence
gaggacgtgcgtggcaacctgaggggcaacaccgaggggctgcagaagtcactggcagag

SEQ ID NO: 4383 - DNA, 60 bp, Artificial Sequence
  Description of Artificial Sequence: targeting sequence/synthetic sequence
cccgagggtgccgggggcctcccgcccccccagagaacacagcgcagcacggaaattcta

SEQ ID NO: 4384 - DNA, 60 bp, Artificial Sequence
  Description of Artificial Sequence: targeting sequence/synthetic sequence
attggggtggccatgggcatcgctggctctgacgtctccaagcaggcagctgacatgatc

SEQ ID NO: 4385 - DNA, 60 bp, Artificial Sequence
  Description of Artificial Sequence: targeting sequence/synthetic sequence
ttggtccgtgagatgtcaggctccccagcttctggcattcctgtcaaagtttctgccacg

SEQ ID NO: 4386 - DNA, 60 bp, Artificial Sequence
  Description of Artificial Sequence: targeting sequence/synthetic sequence
aatggcactggggcaggggcagtcatgggccccaacgccaccgctgaggagggcgcaccc

SEQ ID NO: 4387 - DNA, 60 bp, Artificial Sequence
  Description of Artificial Sequence: targeting sequence/synthetic sequence
tctcctgtatgtggctcagacggcgtaacctacagtacggaatgtgaactaaagaaagca

SEQ ID NO: 4388 - DNA, 60 bp, Artificial Sequence
  Description of Artificial Sequence: targeting sequence/synthetic sequence
atgaagaaggagatgatcatgtccgacgaggccgtggaggagaggcgggccttgatcaag

SEQ ID NO: 4389 - DNA, 60 bp, Artificial Sequence
  Description of Artificial Sequence: targeting sequence/synthetic sequence
gtgctccctggggcggagggcccggcgtctggggagggtcacgctggcaatctggcccgg

SEQ ID NO: 4390 - DNA, 60 bp, Artificial Sequence
  Description of Artificial Sequence: targeting sequence/synthetic sequence
cccgtatgtgggtctgacgcaagcacttacagcaacgaatgtgagttgcagagggcacag

SEQ ID NO: 4391 - DNA, 60 bp, Artificial Sequence
  Description of Artificial Sequence: targeting sequence/synthetic sequence
ggtgtgggaatcagtgggaatgaaggcatgcaggccaccaacaactcggattacgccatc

SEQ ID NO: 4392 - DNA, 60 bp, Artificial Sequence
  Description of Artificial Sequence: targeting sequence/synthetic sequence
gaggaagtgatcgtggagaagaccaagcagaccgtggccagcatcagctccggccccaag

SEQ ID NO: 4393 - DNA, 60 bp, Artificial Sequence
  Description of Artificial Sequence: targeting sequence/synthetic sequence
gccctctccagatcagcagttcaggagagcacaggaggcaaaacacagattgctgggctt

SEQ ID NO: 4394 - DNA, 60 bp, Artificial Sequence
  Description of Artificial Sequence: targeting sequence/synthetic sequence
caggagaccatcgaccgcttggcgggtaaacccacccatgtcaatgtgtctgttgtcatg

SEQ ID NO: 4395 - DNA, 60 bp, Artificial Sequence
  Description of Artificial Sequence: targeting sequence/synthetic sequence
gaggctctgcacaaccactacacgcagaagagcctctccctgtctccggagctgcaactg

SEQ ID NO: 4396 - DNA, 60 bp, Artificial Sequence
  Description of Artificial Sequence: targeting sequence/synthetic sequence
gtaggcttggaggccagcaacaatggcagtatgcgcaacacttcacaagatagggagaga

SEQ ID NO: 4397 - DNA, 60 bp, Artificial Sequence
  Description of Artificial Sequence: targeting sequence/synthetic sequence
ctcctggtattgggatttgaggtccaggggacccaacagccccagcaagatgagatgcct

SEQ ID NO: 4398 - DNA, 60 bp, Artificial Sequence
  Description of Artificial Sequence: targeting sequence/synthetic sequence
gatgaggataccagagaggcattggtcaaaaaatttggtgctcagaatgtagctcggagg

SEQ ID NO: 4399 - DNA, 60 bp, Artificial Sequence
  Description of Artificial Sequence: targeting sequence/synthetic sequence
ctacttggagccacagccatagaagatcgccttcaagcaggagttccagaaaccatcgca

SEQ ID NO: 4400 - DNA, 60 bp, Artificial Sequence
  Description of Artificial Sequence: targeting sequence/synthetic sequence
cccttggccgaggacgtgcgtggcaacctgaggggcaacaccgaggggctgcagaagtca

SEQ ID NO: 4401 - DNA, 60 bp, Artificial Sequence
  Description of Artificial Sequence: targeting sequence/synthetic sequence
gagcagatcgccgacagccagcaccggagccaccggcagatggccaccacaaccaacccc

SEQ ID NO: 4402 - DNA, 60 bp, Artificial Sequence
  Description of Artificial Sequence: targeting sequence/synthetic sequence
cacatcctgcagaccgccagcatccagggcgaccgggtggccgacgtgatcgagagctcc

SEQ ID NO: 4403 - DNA, 60 bp, Artificial Sequence
  Description of Artificial Sequence: targeting sequence/synthetic sequence
atcgtcttggagaaggagttgcgactgaaggagaccttgaaaaatcagggtgtctccaat

SEQ ID NO: 4404 - DNA, 60 bp, Artificial Sequence
  Description of Artificial Sequence: targeting sequence/synthetic sequence
gtgtacaaggtgctgaagcaggtccaccccgacaccggcatctcttccaaggctatggga

SEQ ID NO: 4405 - DNA, 60 bp, Artificial Sequence
  Description of Artificial Sequence: targeting sequence/synthetic sequence
ttaagacaacaggatcttgatggggagctaagatctgaaaaagaaggaagagatagaaaa

SEQ ID NO: 4406 - DNA, 60 bp, Artificial Sequence
  Description of Artificial Sequence: targeting sequence/synthetic sequence
aacgtgaccgccagaaacttcccacctagccaggatgcctccggggacctgtacaccacg

SEQ ID NO: 4407 - DNA, 60 bp, Artificial Sequence
  Description of Artificial Sequence: targeting sequence/synthetic sequence
gtgcgggtggccgacaccgtgcagaccagcgccaccaacagcgagcgggtgcccaacctg

SEQ ID NO: 4408 - DNA, 60 bp, Artificial Sequence
  Description of Artificial Sequence: targeting sequence/synthetic sequence
gccgtgcgcctgctgctgcctggggaactggccaagcacgccgtgtccgagggcactaag

SEQ ID NO: 4409 - DNA, 60 bp, Artificial Sequence
  Description of Artificial Sequence: targeting sequence/synthetic sequence
cagatcctgggccagctgcagagctccctgcagaccggcagcgaggaactgaagagcctg

SEQ ID NO: 4410 - DNA, 60 bp, Artificial Sequence
  Description of Artificial Sequence: targeting sequence/synthetic sequence
gggcacttaatggggaaaaagagcacaggggagtcttcttctgtttctgagagagggagc

SEQ ID NO: 4411 - DNA, 60 bp, Artificial Sequence
  Description of Artificial Sequence: targeting sequence/synthetic sequence
acagcccacgtgggtgtgggaatcagtgggaatgaaggcatgcaggccaccaacaactcg

SEQ ID NO: 4412 - DNA, 60 bp, Artificial Sequence
  Description of Artificial Sequence: targeting sequence/synthetic sequence
ttccggaccggcgtgccccctaagaacgtggagtacaccgagggcgaggaagccaagacc

SEQ ID NO: 4413 - DNA, 60 bp, Artificial Sequence
  Description of Artificial Sequence: targeting sequence/synthetic sequence
gagtggattggggaaatcaatcatagtggaagcaccaactacaacccgtccctcaagagt

SEQ ID NO: 4414 - DNA, 60 bp, Artificial Sequence
  Description of Artificial Sequence: targeting sequence/synthetic sequence
gccgctaccagccgggacgccctgcccaacaccgaggccagcggccccacccacagcaag

SEQ ID NO: 4415 - DNA, 60 bp, Artificial Sequence
  Description of Artificial Sequence: targeting sequence/synthetic sequence
aagaaaatcattggccagctgcagagctccctgcagaccggcagcgaggaactgaagagc

SEQ ID NO: 4416 - DNA, 60 bp, Artificial Sequence
  Description of Artificial Sequence: targeting sequence/synthetic sequence
agccgggtggccgacaccatcatgagcggccccagcaacagccagcaagtgcccgccctg

SEQ ID NO: 4417 - DNA, 60 bp, Artificial Sequence
  Description of Artificial Sequence: targeting sequence/synthetic sequence
cagatcctgggccagctgcagcccgccctgaagaccggcaccgaggacctgcagagcctg

SEQ ID NO: 4418 - DNA, 60 bp, Artificial Sequence
  Description of Artificial Sequence: targeting sequence/synthetic sequence
gggaccaccctttataatccctccctcgagagtcgagtcaccatgtcagtagacacatcc

SEQ ID NO: 4419 - DNA, 60 bp, Artificial Sequence
  Description of Artificial Sequence: targeting sequence/synthetic sequence
gttgcgcccgtatgtgggtctgacgcaagcacttacagcaacgaatgtgagttgcagagg

SEQ ID NO: 4420 - DNA, 60 bp, Artificial Sequence
  Description of Artificial Sequence: targeting sequence/synthetic sequence
gtgaagggcaccggcggagagagccgggacctgcccagcggccagggcatcaacaatctg

SEQ ID NO: 4421 - DNA, 60 bp, Artificial Sequence
  Description of Artificial Sequence: targeting sequence/synthetic sequence
gccagcaacaatggcagtatgcgcaacacttcacaagatagggagagagaagtggacaac

SEQ ID NO: 4422 - DNA, 60 bp, Artificial Sequence
  Description of Artificial Sequence: targeting sequence/synthetic sequence
gtcctgagtttggcccaggagcaggtaggaggctcgcctgagaaactgcaggagacatct

SEQ ID NO: 4423 - DNA, 60 bp, Artificial Sequence
  Description of Artificial Sequence: targeting sequence/synthetic sequence
aacaatggcagtatgcgcaacacttcacaagatagggagagagaagtggacaacaaccgt

SEQ ID NO: 4424 - DNA, 60 bp, Artificial Sequence
  Description of Artificial Sequence: targeting sequence/synthetic sequence
atcgagcggagcatcggccgggtggccgacaccatcggcagcggccccagcaacagcgag

SEQ ID NO: 4425 - DNA, 60 bp, Artificial Sequence
  Description of Artificial Sequence: targeting sequence/synthetic sequence
aacatggaggacagcggccacgagaccggcatcgacagccagagccagggcagcttccag

SEQ ID NO: 4426 - DNA, 60 bp, Artificial Sequence
  Description of Artificial Sequence: targeting sequence/synthetic sequence
tcgggggagctgggccggatcctcactgtgcctgagagtcagaagggagccctgcagggc

SEQ ID NO: 4427 - DNA, 60 bp, Artificial Sequence
  Description of Artificial Sequence: targeting sequence/synthetic sequence
caacaggatcttgatggggagctaagatctgaaaaagaaggaagagatagaaaaaaagac

SEQ ID NO: 4428 - DNA, 60 bp, Artificial Sequence
  Description of Artificial Sequence: targeting sequence/synthetic sequence
gcgaccaaggtatgcggtagtgacggggtgacctacggtaatgaatgtcagctcaaaacg

SEQ ID NO: 4429 - DNA, 60 bp, Artificial Sequence
  Description of Artificial Sequence: targeting sequence/synthetic sequence
attggggaaatcaatcatagtggaagcaccaactacaacccgtccctcaagagtcgagtc

SEQ ID NO: 4430 - DNA, 60 bp, Artificial Sequence
  Description of Artificial Sequence: targeting sequence/synthetic sequence
aaatcagaagtatctacagatttgattcaggcaaatcctaaacaaggcgcgttagcgaaa

SEQ ID NO: 4431 - DNA, 60 bp, Artificial Sequence
  Description of Artificial Sequence: targeting sequence/synthetic sequence
cacgccaccaagaccgccaaggatgcactgagcagcgtgcaggagtcccaggtggcccag

SEQ ID NO: 4432 - DNA, 60 bp, Artificial Sequence
  Description of Artificial Sequence: targeting sequence/synthetic sequence
gctaagaaggatgaccagatgctgaagaggagaaatgtaagctcatttcctgatgatgct

SEQ ID NO: 4433 - DNA, 60 bp, Artificial Sequence
  Description of Artificial Sequence: targeting sequence/synthetic sequence
aagatcattcggcagctgcagcccagcctgcagaccggcagcgaggaactgaagagcctg

SEQ ID NO: 4434 - DNA, 60 bp, Artificial Sequence
  Description of Artificial Sequence: targeting sequence/synthetic sequence
ggccggatcctcactgtgcctgagagtcagaagggagccctgcagggctaccgggatgct

SEQ ID NO: 4435 - DNA, 60 bp, Artificial Sequence
  Description of Artificial Sequence: targeting sequence/synthetic sequence
tcggaggaggatcagtcgctggagaacagtgaggccgatgtgaaggagtccaggaaggat

SEQ ID NO: 4436 - DNA, 60 bp, Artificial Sequence
  Description of Artificial Sequence: targeting sequence/synthetic sequence
agcgccgtgagccgggtggccgacaccatcatgagcggccccagcaacagccagcaagtg

SEQ ID NO: 4437 - DNA, 60 bp, Artificial Sequence
  Description of Artificial Sequence: targeting sequence/synthetic sequence
agcatcagccccgacgatccccctcgggagatcaccgacgagaacctgcacaagatccgg

SEQ ID NO: 4438 - DNA, 60 bp, Artificial Sequence
  Description of Artificial Sequence: targeting sequence/synthetic sequence
atcgtgcgggtggccgacaccctgcccagcggccccagcaacagcgagagcatccccgcc

SEQ ID NO: 4439 - DNA, 60 bp, Artificial Sequence
  Description of Artificial Sequence: targeting sequence/synthetic sequence
gcagcccttgtgcagcaagaagaagaaaaggctgaacaacggaaaagagctcgggctgag

SEQ ID NO: 4440 - DNA, 60 bp, Artificial Sequence
  Description of Artificial Sequence: targeting sequence/synthetic sequence
acccaaggcgtgaacgatggtgacatgcggctggccgatgggggcgccaccaaccagggc

SEQ ID NO: 4441 - DNA, 60 bp, Artificial Sequence
  Description of Artificial Sequence: targeting sequence/synthetic sequence
gaatcccgaggacactcagccactcagctgccagcggaaaaaactgtcgggggaccatcg

SEQ ID NO: 4442 - DNA, 60 bp, Artificial Sequence
  Description of Artificial Sequence: targeting sequence/synthetic sequence
caccaggccagcctgagcaagcagcccaccagccagccccggggcgaccccaccggcccc

SEQ ID NO: 4443 - DNA, 60 bp, Artificial Sequence
  Description of Artificial Sequence: targeting sequence/synthetic sequence
caaggctcctcctcacagtcccagggcatatccagctcctctaccagcacgatgccaaac

SEQ ID NO: 4444 - DNA, 60 bp, Artificial Sequence
  Description of Artificial Sequence: targeting sequence/synthetic sequence
gagaacgccgtggcccgggtggccgacaccatcggcagcggccccagcaacagccaggcc

SEQ ID NO: 4445 - DNA, 60 bp, Artificial Sequence
  Description of Artificial Sequence: targeting sequence/synthetic sequence
gacgcaagcacttacagcaacgaatgtgagttgcagagggcacagtgctctcagcagcgt

SEQ ID NO: 4446 - DNA, 60 bp, Artificial Sequence
  Description of Artificial Sequence: targeting sequence/synthetic sequence
aaggagagcggcggaggcgtgaccaaggagagcgccgagaagggcttcgagaagatcggc

SEQ ID NO: 4447 - DNA, 60 bp, Artificial Sequence
  Description of Artificial Sequence: targeting sequence/synthetic sequence
cagatcattcggcagctgcagcccagcctgcagaccggcagcgaggaactgcggagcctg

SEQ ID NO: 4448 - DNA, 60 bp, Artificial Sequence
  Description of Artificial Sequence: targeting sequence/synthetic sequence
aggaagagagaaaagcagctgtcccagacacagtcacagcagcaagtccaggaggcagag

SEQ ID NO: 4449 - DNA, 60 bp, Artificial Sequence
  Description of Artificial Sequence: targeting sequence/synthetic sequence
cccgagggcagctccatcagcgcccccagccagaccagcgtggacgtgagcctgatccag

SEQ ID NO: 4450 - DNA, 60 bp, Artificial Sequence
  Description of Artificial Sequence: targeting sequence/synthetic sequence
cacttaatggggaaaaagagcacaggggagtcttcttctgtttctgagagagggagcctg

SEQ ID NO: 4451 - DNA, 60 bp, Artificial Sequence
  Description of Artificial Sequence: targeting sequence/synthetic sequence
agcgagatggcaaacaaacgtatgaaagtaaaacatgatgatcactatgagttaatagta

SEQ ID NO: 4452 - DNA, 60 bp, Artificial Sequence
  Description of Artificial Sequence: targeting sequence/synthetic sequence
gaggccagcaacaatggcagtatgcgcaacacttcacaagatagggagagagaagtggac

SEQ ID NO: 4453 - DNA, 60 bp, Artificial Sequence
  Description of Artificial Sequence: targeting sequence/synthetic sequence
cacggggctgcgttccagctcacccagggagaccagctatccacccacacagatggcatc

SEQ ID NO: 4454 - DNA, 60 bp, Artificial Sequence
  Description of Artificial Sequence: targeting sequence/synthetic sequence
agcatcgtcttggagaaggagttgcgactgaaggagaccttgaaaaatcagggtgtctcc

SEQ ID NO: 4455 - DNA, 60 bp, Artificial Sequence
  Description of Artificial Sequence: targeting sequence/synthetic sequence
atcgagaagctgaacgaccggatcacccacgacgagcaggccatccgggacctgaccctg

SEQ ID NO: 4456 - DNA, 60 bp, Artificial Sequence
  Description of Artificial Sequence: targeting sequence/synthetic sequence
ccagaggagaatgctccgtctgaaggccagcgtgtgtggggtcagggacagagccccagg

SEQ ID NO: 4457 - DNA, 60 bp, Artificial Sequence
  Description of Artificial Sequence: targeting sequence/synthetic sequence
tggtacgtggacggcgtggaggtgcataatgccaagacaaagccacgggaggagcagttc

SEQ ID NO: 4458 - DNA, 60 bp, Artificial Sequence
  Description of Artificial Sequence: targeting sequence/synthetic sequence
cccctgtacgccgacaccgccaccacaaacaaggagaagaccatcaagatcagctccagc

SEQ ID NO: 4459 - DNA, 60 bp, Artificial Sequence
  Description of Artificial Sequence: targeting sequence/synthetic sequence
gagatcattcacgccgctaaccaggccgtggaccaggccggcatcgagaagctggtggag

SEQ ID NO: 4460 - DNA, 60 bp, Artificial Sequence
  Description of Artificial Sequence: targeting sequence/synthetic sequence
acccagtcccaaggctcctcctcacagtcccagggcatatccagctcctctaccagcacg

SEQ ID NO: 4461 - DNA, 60 bp, Artificial Sequence
  Description of Artificial Sequence: targeting sequence/synthetic sequence
atcaccgccgctatcggccgggtggccgacaccgtgggcaccggccccaccaacagcgag

SEQ ID NO: 4462 - DNA, 60 bp, Artificial Sequence
  Description of Artificial Sequence: targeting sequence/synthetic sequence
cttggactcagtaaaagtgattctagcaatagtgattccactcagagtcagaagtctggc

SEQ ID NO: 4463 - DNA, 60 bp, Artificial Sequence
  Description of Artificial Sequence: targeting sequence/synthetic sequence
ttggaggccagcaacaatggcagtatgcgcaacacttcacaagatagggagagagaagtg

SEQ ID NO: 4464 - DNA, 60 bp, Artificial Sequence
  Description of Artificial Sequence: targeting sequence/synthetic sequence
cagatcattggccagctgcagcccgccatccagaccggcaccgaggaactgcggagcctg

SEQ ID NO: 4465 - DNA, 60 bp, Artificial Sequence
  Description of Artificial Sequence: targeting sequence/synthetic sequence
gtgtacaaggttctgaagcaggtccaccctgacaccggcatttcgtccaaggccatgggc

SEQ ID NO: 4466 - DNA, 60 bp, Artificial Sequence
  Description of Artificial Sequence: targeting sequence/synthetic sequence
ccagctgctgctcctgcccctgcctcagtcccacagatatcccagccccccttcttgttg

SEQ ID NO: 4467 - DNA, 60 bp, Artificial Sequence
  Description of Artificial Sequence: targeting sequence/synthetic sequence
gccgtgcgcctgctgcttcccggagagctggccaagcacgccgtgtcggagggcaccaag

SEQ ID NO: 4468 - DNA, 60 bp, Artificial Sequence
  Description of Artificial Sequence: targeting sequence/synthetic sequence
gtgtacaaggtgctgaagcaggtccatcccgacaccggcatctcttccaaggcaatgggg

SEQ ID NO: 4469 - DNA, 60 bp, Artificial Sequence
  Description of Artificial Sequence: targeting sequence/synthetic sequence
gtggacaagtcctggattcctgaaggagtggtgcgatcaaatggtcatgcctctacggat

SEQ ID NO: 4470 - DNA, 60 bp, Artificial Sequence
  Description of Artificial Sequence: targeting sequence/synthetic sequence
ggacccggacccgggcccgggcccgggcccggcgcagacatgcagcgcagctatgacagc

SEQ ID NO: 4471 - DNA, 60 bp, Artificial Sequence
  Description of Artificial Sequence: targeting sequence/synthetic sequence
cagaagatcattagcgtgctggagcccctggtgcccaccggcagcgagaacctgaagagc

SEQ ID NO: 4472 - DNA, 60 bp, Artificial Sequence
  Description of Artificial Sequence: targeting sequence/synthetic sequence
ttgaaggtcctgagtttggcccaggagcaggtaggaggctcgcctgagaaactgcaggag

SEQ ID NO: 4473 - DNA, 60 bp, Artificial Sequence
  Description of Artificial Sequence: targeting sequence/synthetic sequence
ggcgccatcggccgggtggccgacaccatccggagcggccccagcaacagcgaggccgtg

SEQ ID NO: 4474 - DNA, 60 bp, Artificial Sequence
  Description of Artificial Sequence: targeting sequence/synthetic sequence
gagtccaggaaggatgtgctccctggggcggagggcccggcgtctggggagggtcacgct

SEQ ID NO: 4475 - DNA, 60 bp, Artificial Sequence
  Description of Artificial Sequence: targeting sequence/synthetic sequence
tcacagtcccagggcatatccagctcctctaccagcacgatgccaaactccagccagtcc

SEQ ID NO: 4476 - DNA, 60 bp, Artificial Sequence
  Description of Artificial Sequence: targeting sequence/synthetic sequence
acagtgtctggcactgactgtgttgctaaagaggccacagaggcagccaagtgtaacctg

SEQ ID NO: 4477 - DNA, 60 bp, Artificial Sequence
  Description of Artificial Sequence: targeting sequence/synthetic sequence
gccatcgagaagctgaacgaccggatcacccacgacgagcaggccatccgggacctgacc

SEQ ID NO: 4478 - DNA, 60 bp, Artificial Sequence
  Description of Artificial Sequence: targeting sequence/synthetic sequence
atcgccatcgagaagctgaacgaccggatcagccacgacgagcaggccatccgggacctg

SEQ ID NO: 4479 - DNA, 60 bp, Artificial Sequence
  Description of Artificial Sequence: targeting sequence/synthetic sequence
actgacctgaggtttcagagcgcagtcgtcggtgcgctgcaggaggctagcgaagcgtac

SEQ ID NO: 4480 - DNA, 60 bp, Artificial Sequence
  Description of Artificial Sequence: targeting sequence/synthetic sequence
gccgtgagccgggtggccgacaccatcatgagcggccccagcaacagccagcaagtgccc

SEQ ID NO: 4481 - DNA, 60 bp, Artificial Sequence
  Description of Artificial Sequence: targeting sequence/synthetic sequence
aaaaggaagtttgctattggttcagcaagagaggcagacccagctctcaatgttgaaaca

SEQ ID NO: 4482 - DNA, 60 bp, Artificial Sequence
  Description of Artificial Sequence: targeting sequence/synthetic sequence
tgcaaggacaccagccacatcctgcagaccgccagcatccagggcgaccgggtggccgac

SEQ ID NO: 4483 - DNA, 60 bp, Artificial Sequence
  Description of Artificial Sequence: targeting sequence/synthetic sequence
aacactgacctgaggtttcagagcgcagtcgtcggtgcgctgcaggaggctagcgaagcg

SEQ ID NO: 4484 - DNA, 60 bp, Artificial Sequence
  Description of Artificial Sequence: targeting sequence/synthetic sequence
gcccagagggagatggggcctgtggcctctgccgacaaacccaccaccaagctcagcgcc

SEQ ID NO: 4485 - DNA, 60 bp, Artificial Sequence
  Description of Artificial Sequence: targeting sequence/synthetic sequence
cacgaggactcccggactctgctcaacgccagccggagcctagaagtcagctacctggcc

SEQ ID NO: 4486 - DNA, 60 bp, Artificial Sequence
  Description of Artificial Sequence: targeting sequence/synthetic sequence
gataaaggggctcaaggactccctggcataacgggacagtcggggctccctggccttcct

SEQ ID NO: 4487 - DNA, 60 bp, Artificial Sequence
  Description of Artificial Sequence: targeting sequence/synthetic sequence
gtcagccacgaggactcccggactctgctcaacgccagccggagcctagaagtcagctac

SEQ ID NO: 4488 - DNA, 60 bp, Artificial Sequence
  Description of Artificial Sequence: targeting sequence/synthetic sequence
accgtgggcgccgctaccagccgggacgccctgcccaacaccgaggccagcggccccacc

SEQ ID NO: 4489 - DNA, 60 bp, Artificial Sequence
  Description of Artificial Sequence: targeting sequence/synthetic sequence
actgtgaagagcatcgtcttggagaaggagttgcgactgaaggagaccttgaaaaatcag

SEQ ID NO: 4490 - DNA, 60 bp, Artificial Sequence
  Description of Artificial Sequence: targeting sequence/synthetic sequence
gcgcccgtatgtgggtctgacgcaagcacttacagcaacgaatgtgagttgcagagggca

SEQ ID NO: 4491 - DNA, 60 bp, Artificial Sequence
  Description of Artificial Sequence: targeting sequence/synthetic sequence
gcattgcaaatgtcatcaccaggcagaaaagaagagtgtgaaagccaaggtgaagtgcag

SEQ ID NO: 4492 - DNA, 60 bp, Artificial Sequence
  Description of Artificial Sequence: targeting sequence/synthetic sequence
agagaaaagcagctgtcccagacacagtcacagcagcaagtccaggaggcagagggtgcc

SEQ ID NO: 4493 - DNA, 60 bp, Artificial Sequence
  Description of Artificial Sequence: targeting sequence/synthetic sequence
agcagtcacgaggaggacacggatggccacgtggctgcggggtcgactttagccaggcgg

SEQ ID NO: 4494 - DNA, 60 bp, Artificial Sequence
  Description of Artificial Sequence: targeting sequence/synthetic sequence
agtgtagggaaaatagagtgtgtatcagcagagaccaccgaagactgcatcgccaagatc

SEQ ID NO: 4495 - DNA, 60 bp, Artificial Sequence
  Description of Artificial Sequence: targeting sequence/synthetic sequence
atcgactccctgctggagaacgaccggcagcagacgcacatgctggatgtcatgcaggac

SEQ ID NO: 4496 - DNA, 60 bp, Artificial Sequence
  Description of Artificial Sequence: targeting sequence/synthetic sequence
gatgaccagatgctgaagaggagaaatgtaagctcatttcctgatgatgctacttctccg

SEQ ID NO: 4497 - DNA, 60 bp, Artificial Sequence
  Description of Artificial Sequence: targeting sequence/synthetic sequence
aacctcctggagaagatgctggtgctggacgcggagcagcgggtgacggcaggcgaggcg

SEQ ID NO: 4498 - DNA, 60 bp, Artificial Sequence
  Description of Artificial Sequence: targeting sequence/synthetic sequence
gaccgcatcgactccctgctggagaacgaccggcagcagacgcacatgctggatgtcatg

SEQ ID NO: 4499 - DNA, 60 bp, Artificial Sequence
  Description of Artificial Sequence: targeting sequence/synthetic sequence
tccccagccccagaggagaatgctccgtctgaaggccagcgtgtgtggggtcagggacag

SEQ ID NO: 4500 - DNA, 60 bp, Artificial Sequence
  Description of Artificial Sequence: targeting sequence/synthetic sequence
gccctgctcgcccagctgtaccgggacaagaccgccgctgagggcgccgtggccggcgtg

SEQ ID NO: 4501 - DNA, 60 bp, Artificial Sequence
  Description of Artificial Sequence: targeting sequence/synthetic sequence
tgtgaagaacagcttgaagagaccatcaaaaactgcctgtcagcggcggaggacaagaag

SEQ ID NO: 4502 - DNA, 60 bp, Artificial Sequence
  Description of Artificial Sequence: targeting sequence/synthetic sequence
cgccgcaagatactgatccggggcctcccgggggacgtgaccaaccaggaagtacatgac

SEQ ID NO: 4503 - DNA, 60 bp, Artificial Sequence
  Description of Artificial Sequence: targeting sequence/synthetic sequence
ctgcaggccttggtccgtgagatgtcaggctccccagcttctggcattcctgtcaaagtt

SEQ ID NO: 4504 - DNA, 60 bp, Artificial Sequence
  Description of Artificial Sequence: targeting sequence/synthetic sequence
ggcgtgaccgccagaaacttcccacccagccaggatgcctccggggacctgtacaccacg

SEQ ID NO: 4505 - DNA, 60 bp, Artificial Sequence
  Description of Artificial Sequence: targeting sequence/synthetic sequence
gccatcaccgccgctatcggccgggtggccgacaccgtgggcaccggccccaccaacagc

SEQ ID NO: 4506 - DNA, 60 bp, Artificial Sequence
  Description of Artificial Sequence: targeting sequence/synthetic sequence
cccagtggcgaatcccgaggacactcagccactcagctgccagcggaaaaaactgtcggg

SEQ ID NO: 4507 - DNA, 60 bp, Artificial Sequence
  Description of Artificial Sequence: targeting sequence/synthetic sequence
ctgcgggtcaccacggtggcttcccacacttctgactcggacgttccttccggtgtcact

SEQ ID NO: 4508 - DNA, 60 bp, Artificial Sequence
  Description of Artificial Sequence: targeting sequence/synthetic sequence
gtgagcggcggaggcgtgaccaaggagagcgccgagaagggcttcgagaagatcggcaac

SEQ ID NO: 4509 - DNA, 60 bp, Artificial Sequence
  Description of Artificial Sequence: targeting sequence/synthetic sequence
cacctacagaaggagctggcagaactccgagagtctaccagccagatgcacacagcatca

SEQ ID NO: 4510 - DNA, 60 bp, Artificial Sequence
  Description of Artificial Sequence: targeting sequence/synthetic sequence
gtgtacaaggtgctgaagcaggtccaccccgacaccggtatctcgtccaaggccatgggc

SEQ ID NO: 4511 - DNA, 60 bp, Artificial Sequence
  Description of Artificial Sequence: targeting sequence/synthetic sequence
ggggcccccgtcaacatctcctcgtccgacctcacaggccgacaagatacctctcgcatg

SEQ ID NO: 4512 - DNA, 60 bp, Artificial Sequence
  Description of Artificial Sequence: targeting sequence/synthetic sequence
cgggtggccgacaccgtgagctccaagcccaccaacagcgagagcatccccgccctgacc

SEQ ID NO: 4513 - DNA, 60 bp, Artificial Sequence
  Description of Artificial Sequence: targeting sequence/synthetic sequence
gtctctagtcgtatggactccacgggggttcccgaccgcatccaggtgaccacggacctg

SEQ ID NO: 4514 - DNA, 60 bp, Artificial Sequence
  Description of Artificial Sequence: targeting sequence/synthetic sequence
gtgtacaaggtgctgaagcaggtccaccccgacaccggcatctcgtccaaggccatgggc

SEQ ID NO: 4515 - DNA, 60 bp, Artificial Sequence
  Description of Artificial Sequence: targeting sequence/synthetic sequence
cgcaagatactgatccggggcctcccgggggacgtgaccaaccaggaagtacatgacctg

SEQ ID NO: 4516 - DNA, 60 bp, Artificial Sequence
  Description of Artificial Sequence: targeting sequence/synthetic sequence
tgtgggtctgacgcaagcacttacagcaacgaatgtgagttgcagagggcacagtgctct

SEQ ID NO: 4517 - DNA, 60 bp, Artificial Sequence
  Description of Artificial Sequence: targeting sequence/synthetic sequence
ctgggccagctgcagagctccctgcagaccggcagcgaggaactgaagagcctgtacaac

SEQ ID NO: 4518 - DNA, 60 bp, Artificial Sequence
  Description of Artificial Sequence: targeting sequence/synthetic sequence
acccctcgtcacttgcaacttgctattcgtggagatgaagaattggattctctcatcaag

SEQ ID NO: 4519 - DNA, 60 bp, Artificial Sequence
  Description of Artificial Sequence: targeting sequence/synthetic sequence
gccttccgggccggcgtgccccctaagaacgtggagtacaccgagggcgaggaagccaag

SEQ ID NO: 4520 - DNA, 60 bp, Artificial Sequence
  Description of Artificial Sequence: targeting sequence/synthetic sequence
gtgcagggcgagcgggtggccggccagcccgtggtcctggacgtggccgctggcggaatc

SEQ ID NO: 4521 - DNA, 60 bp, Artificial Sequence
  Description of Artificial Sequence: targeting sequence/synthetic sequence
cgctcccagctgctgataatggaccgggcagctgaccccgtgtccccactactgcatgag

SEQ ID NO: 4522 - DNA, 60 bp, Artificial Sequence
  Description of Artificial Sequence: targeting sequence/synthetic sequence
gatgccaagggcctgtccaacccctctgaggtggagactctgcgagagaaggtttatgcc

SEQ ID NO: 4523 - DNA, 60 bp, Artificial Sequence
  Description of Artificial Sequence: targeting sequence/synthetic sequence
accacagccggcgtggccatgggcaccgccagcctgaccctgagcgcccagagccggacc

SEQ ID NO: 4524 - DNA, 60 bp, Artificial Sequence
  Description of Artificial Sequence: targeting sequence/synthetic sequence
agcgacatcctgcagaccggcaccatccagggcgaccgggtggccgacgtgatcgagagc

SEQ ID NO: 4525 - DNA, 60 bp, Artificial Sequence
  Description of Artificial Sequence: targeting sequence/synthetic sequence
gcagagaaggaagcagcccttgtgcagcaagaagaagaaaaggctgaacaacggaaaaga

SEQ ID NO: 4526 - DNA, 60 bp, Artificial Sequence
  Description of Artificial Sequence: targeting sequence/synthetic sequence
atcggccagctgcagagctccctgcagaccggcagcgaggaactgaagagcctgtacaac

SEQ ID NO: 4527 - DNA, 60 bp, Artificial Sequence
  Description of Artificial Sequence: targeting sequence/synthetic sequence
ggcgccgctaccagccgggacgccctgcccaacaccgaggccagcggccccacccacagc

SEQ ID NO: 4528 - DNA, 60 bp, Artificial Sequence
  Description of Artificial Sequence: targeting sequence/synthetic sequence
atcggccagctgcagcccagcatccagaccggcagcgaggaaatccggagcctgtacaac

SEQ ID NO: 4529 - DNA, 60 bp, Artificial Sequence
  Description of Artificial Sequence: targeting sequence/synthetic sequence
agcaacaatggcagtatgcgcaacacttcacaagatagggagagagaagtggacaacaac

SEQ ID NO: 4530 - DNA, 60 bp, Artificial Sequence
  Description of Artificial Sequence: targeting sequence/synthetic sequence
ggcatcgggagcatcgtgaccagcatgggctccagcatgccaccctctccctctaatggg

SEQ ID NO: 4531 - DNA, 60 bp, Artificial Sequence
  Description of Artificial Sequence: targeting sequence/synthetic sequence
atgatggaacatgagatgggtggccaccaccctggtgctgactatccagttgatgggctg

SEQ ID NO: 4532 - DNA, 60 bp, Artificial Sequence
  Description of Artificial Sequence: targeting sequence/synthetic sequence
aagcagatcattaagcagctgcagcccgccctgcagaccggcaccgaggaactgaagagc

SEQ ID NO: 4533 - DNA, 60 bp, Artificial Sequence
  Description of Artificial Sequence: targeting sequence/synthetic sequence
gtggagagcgccgtgagccgggtggccgacaccatcatgagcggccccagcaacagccag

SEQ ID NO: 4534 - DNA, 60 bp, Artificial Sequence
  Description of Artificial Sequence: targeting sequence/synthetic sequence
gcccacgtgggtgtgggaatcagtgggaatgaaggcatgcaggccaccaacaactcggat

SEQ ID NO: 4535 - DNA, 60 bp, Artificial Sequence
  Description of Artificial Sequence: targeting sequence/synthetic sequence
gtgtacaaggtgctaaagcaggtccaccccgacaccggcatctcatccaaggccatgggc

SEQ ID NO: 4536 - DNA, 60 bp, Artificial Sequence
  Description of Artificial Sequence: targeting sequence/synthetic sequence
caaggcgtgaacgatggtgacatgcggctggccgatgggggcgccaccaaccagggccgc

SEQ ID NO: 4537 - DNA, 60 bp, Artificial Sequence
  Description of Artificial Sequence: targeting sequence/synthetic sequence
ggctacatcagcaaggagagcgacagcgccagcgacggcatcacccaggccgctgccctg

SEQ ID NO: 4538 - DNA, 60 bp, Artificial Sequence
  Description of Artificial Sequence: targeting sequence/synthetic sequence
ctggtgcagctgcagcccgccctgcagaccggcaccgaggaaatcaagagcctgtacaac

SEQ ID NO: 4539 - DNA, 60 bp, Artificial Sequence
  Description of Artificial Sequence: targeting sequence/synthetic sequence
actccgcgtcacttgcagcttgcaatccgtggtgatgaagagttggattctcttatcaag

SEQ ID NO: 4540 - DNA, 60 bp, Artificial Sequence
  Description of Artificial Sequence: targeting sequence/synthetic sequence
cttttcccagccacagatgccagctgtgaggacaagtcagctgccagagggctggcccag

SEQ ID NO: 4541 - DNA, 60 bp, Artificial Sequence
  Description of Artificial Sequence: targeting sequence/synthetic sequence
gcaggggcagtcatgggccccaacgccaccgctgaggagggcgcaccctctgctgcagca

SEQ ID NO: 4542 - DNA, 60 bp, Artificial Sequence
  Description of Artificial Sequence: targeting sequence/synthetic sequence
acccagagtggagcccagagggagatggggcctgtggcctctgccgacaaacccaccacc

SEQ ID NO: 4543 - DNA, 60 bp, Artificial Sequence
  Description of Artificial Sequence: targeting sequence/synthetic sequence
ctcagtaaaagtgattctagcaatagtgattccactcagagtcagaagtctggcaggaac

SEQ ID NO: 4544 - DNA, 60 bp, Artificial Sequence
  Description of Artificial Sequence: targeting sequence/synthetic sequence
gtccaccccgacaccggcatctcttccaaggctatgggaatcatgaactccttcgtcaac

SEQ ID NO: 4545 - DNA, 60 bp, Artificial Sequence
  Description of Artificial Sequence: targeting sequence/synthetic sequence
gagcagatcgccgacagccagcaccggagccaccggcagatgaccacaaccacaaacccc

SEQ ID NO: 4546 - DNA, 60 bp, Artificial Sequence
  Description of Artificial Sequence: targeting sequence/synthetic sequence
gtgatgcacgaggccctgcacaaccactacacccagaagagcctgagcctgagccccggc

SEQ ID NO: 4547 - DNA, 60 bp, Artificial Sequence
  Description of Artificial Sequence: targeting sequence/synthetic sequence
cacaaccactacacgcagaagagcctctccctgtctccggagctgcaactggaggagagc

SEQ ID NO: 4548 - DNA, 60 bp, Artificial Sequence
  Description of Artificial Sequence: targeting sequence/synthetic sequence
ggcgtgctgagcgccgctggcagcaccatgggcgccgctgccaccacactggccgtgcag

SEQ ID NO: 4549 - DNA, 60 bp, Artificial Sequence
  Description of Artificial Sequence: targeting sequence/synthetic sequence
cagatcaccgccggcatcgccctggccgaggcccgggaggcccggaaggacatcgccctg

SEQ ID NO: 4550 - DNA, 60 bp, Artificial Sequence
  Description of Artificial Sequence: targeting sequence/synthetic sequence
aatggcagtatgcgcaacacttcacaagatagggagagagaagtggacaacaaccgtgag

SEQ ID NO: 4551 - DNA, 60 bp, Artificial Sequence
  Description of Artificial Sequence: targeting sequence/synthetic sequence
ggcgtcaccacggaccaggtgcaggctgaggccaaagagtctgggcccacgacctacaag

SEQ ID NO: 4552 - DNA, 60 bp, Artificial Sequence
  Description of Artificial Sequence: targeting sequence/synthetic sequence
gtctttgctctggatcagaagatgcgcccgagcactgacaccatcacagtcatggtggag

SEQ ID NO: 4553 - DNA, 60 bp, Artificial Sequence
  Description of Artificial Sequence: targeting sequence/synthetic sequence
aggccaaagaccggtgtcaggggattgcacaaatcactcaccgacgtggccctggagcac

SEQ ID NO: 4554 - DNA, 60 bp, Artificial Sequence
  Description of Artificial Sequence: targeting sequence/synthetic sequence
gagagtctcgtggaggaggagcgaccgagtggccctggtggtggcgggaagcagagagca

SEQ ID NO: 4555 - DNA, 60 bp, Artificial Sequence
  Description of Artificial Sequence: targeting sequence/synthetic sequence
atcagccccgacgatccccctcgggagatcaccgacgagaacctgcacaagatccggctg

SEQ ID NO: 4556 - DNA, 60 bp, Artificial Sequence
  Description of Artificial Sequence: targeting sequence/synthetic sequence
gaggcccacctggccgaggaaaacgacggcgacaacgcctgcaagcggacctacagcgac

SEQ ID NO: 4557 - DNA, 60 bp, Artificial Sequence
  Description of Artificial Sequence: targeting sequence/synthetic sequence
agtgggagcaccacctacaacccctccctcaagagtcgagtcaccctttcactagacacg

SEQ ID NO: 4558 - DNA, 60 bp, Artificial Sequence
  Description of Artificial Sequence: targeting sequence/synthetic sequence
gccccaacccttttccccctcgtctcctgtgagaattccccgtcggatacgagcagcgtg

SEQ ID NO: 4559 - DNA, 60 bp, Artificial Sequence
  Description of Artificial Sequence: targeting sequence/synthetic sequence
gccagaaacttcccacctagccaggatgcctccggggacctgtacaccacgagcagccag

SEQ ID NO: 4560 - DNA, 60 bp, Artificial Sequence
  Description of Artificial Sequence: targeting sequence/synthetic sequence
tacgccgacaccgccaccacaaacaaggagaagaccatcaagatcagctccagcggcaac

SEQ ID NO: 4561 - DNA, 60 bp, Artificial Sequence
  Description of Artificial Sequence: targeting sequence/synthetic sequence
gcaccagtatgcggagatgatggagttacgtacgaaaatgactgcgtgatgggccggtct

SEQ ID NO: 4562 - DNA, 60 bp, Artificial Sequence
  Description of Artificial Sequence: targeting sequence/synthetic sequence
aatttgctgctacttggagccacagccatagaagatcgccttcaagcaggagttccagaa

SEQ ID NO: 4563 - DNA, 60 bp, Artificial Sequence
  Description of Artificial Sequence: targeting sequence/synthetic sequence
cgggccatcgcccgggtggccgacaccatcagctccggccccgtgaacagcgagagcatc

SEQ ID NO: 4564 - DNA, 60 bp, Artificial Sequence
  Description of Artificial Sequence: targeting sequence/synthetic sequence
acgctctacgagatcaactacaaggctgtcggctcgctggacccaagtgctgacctctcg

SEQ ID NO: 4565 - DNA, 60 bp, Artificial Sequence
  Description of Artificial Sequence: targeting sequence/synthetic sequence
ctggttctcctcgcggtgctgcctgtgctcctcctgcagatcactgttggcctcgtcttc

SEQ ID NO: 4566 - DNA, 60 bp, Artificial Sequence
  Description of Artificial Sequence: targeting sequence/synthetic sequence
gaggaggacacggatggccacgtggctgcggggtcgactttagccaggcggaaaaggagc

SEQ ID NO: 4567 - DNA, 60 bp, Artificial Sequence
  Description of Artificial Sequence: targeting sequence/synthetic sequence
cagcaaatcctgggccagctgcagcccgccctgaagaccggcaccgaggacctgcagagc

SEQ ID NO: 4568 - DNA, 60 bp, Artificial Sequence
  Description of Artificial Sequence: targeting sequence/synthetic sequence
ccgcgtcacttgcagcttgcaatccgtggtgatgaagagttggattctcttatcaaggct

SEQ ID NO: 4569 - DNA, 60 bp, Artificial Sequence
  Description of Artificial Sequence: targeting sequence/synthetic sequence
cagggtggtgtcctgcccaacatccaggctgtgctactgcccaagaagaccgagagtcac

SEQ ID NO: 4570 - DNA, 60 bp, Artificial Sequence
  Description of Artificial Sequence: targeting sequence/synthetic sequence
ggaaggatgctggtgctggacagtgaccagagggtcagtgcagctgaggcactggcccac

SEQ ID NO: 4571 - DNA, 60 bp, Artificial Sequence
  Description of Artificial Sequence: targeting sequence/synthetic sequence
tccgacaaatgtgaagaacagcttgaagagaccatcaaaaactgcctgtcagcggcggag

SEQ ID NO: 4572 - DNA, 60 bp, Artificial Sequence
  Description of Artificial Sequence: targeting sequence/synthetic sequence
cagaaggagctggcagaactccgagagtctaccagccagatgcacacagcatcatctttg

SEQ ID NO: 4573 - DNA, 60 bp, Artificial Sequence
  Description of Artificial Sequence: targeting sequence/synthetic sequence
aaagaagaagcattgcaaatgtcatcaccaggcagaaaagaagagtgtgaaagccaaggt

SEQ ID NO: 4574 - DNA, 60 bp, Artificial Sequence
  Description of Artificial Sequence: targeting sequence/synthetic sequence
gtggagatcattcacgccgctaaccaggccgtggaccaggccggcatcgagaagctggtg

SEQ ID NO: 4575 - DNA, 60 bp, Artificial Sequence
  Description of Artificial Sequence: targeting sequence/synthetic sequence
aaggatgtgctccctggggcggagggcccggcgtctggggagggtcacgctggcaatctg

SEQ ID NO: 4576 - DNA, 60 bp, Artificial Sequence
  Description of Artificial Sequence: targeting sequence/synthetic sequence
tcgccccctgagagtctcgtggaggaggagcgaccgagtggccctggtggtggcgggaag

SEQ ID NO: 4577 - DNA, 60 bp, Artificial Sequence
  Description of Artificial Sequence: targeting sequence/synthetic sequence
cccgccacatgtcgcggcgcaccagagggaactgtgtgtggctctgatggagccgactac

SEQ ID NO: 4578 - DNA, 60 bp, Artificial Sequence
  Description of Artificial Sequence: targeting sequence/synthetic sequence
gtgtacaaggtgctgaaacaggtccatcccgacactggcatctcttccaaggccatgggc

SEQ ID NO: 4579 - DNA, 60 bp, Artificial Sequence
  Description of Artificial Sequence: targeting sequence/synthetic sequence
gccggcatcgccctggccgaggcccgggaggcccggaaggacatcgccctgatcaaggac

SEQ ID NO: 4580 - DNA, 60 bp, Artificial Sequence
  Description of Artificial Sequence: targeting sequence/synthetic sequence
atcatccctcgtcacctccagctggccatccgcaacgacgaggaactgaacaagctgctg

SEQ ID NO: 4581 - DNA, 60 bp, Artificial Sequence
  Description of Artificial Sequence: targeting sequence/synthetic sequence
cagaagatcctgaaggtgctggagcccctggtgcccaccggcagcgagaacctgaagagc

SEQ ID NO: 4582 - DNA, 60 bp, Artificial Sequence
  Description of Artificial Sequence: targeting sequence/synthetic sequence
gtgttcgaggacgtgaagggcaccggcggagagagccgggacctgcccagcggccagggc

SEQ ID NO: 4583 - DNA, 60 bp, Artificial Sequence
  Description of Artificial Sequence: targeting sequence/synthetic sequence
accaccagcattgccaccaccaccaccaccaccacagagtctgtggaagaggtggttcga

SEQ ID NO: 4584 - DNA, 60 bp, Artificial Sequence
  Description of Artificial Sequence: targeting sequence/synthetic sequence
atcgtgaccagcatgggctccagcatgccaccctctccctctaatgggtccagcttctcc

SEQ ID NO: 4585 - DNA, 60 bp, Artificial Sequence
  Description of Artificial Sequence: targeting sequence/synthetic sequence
gaggctctcaaggagaacggcggcgccagactggccgagtaccacgccaaggccaccgag

SEQ ID NO: 4586 - DNA, 60 bp, Artificial Sequence
  Description of Artificial Sequence: targeting sequence/synthetic sequence
gaacggtgtgtggacaagtcctggattcctgaaggagtggtgcgatcaaatggtcatgcc

SEQ ID NO: 4587 - DNA, 60 bp, Artificial Sequence
  Description of Artificial Sequence: targeting sequence/synthetic sequence
tgctgcctggtccctgtctccctggctgaggatccccagggagatgctgcccagaagaca

SEQ ID NO: 4588 - DNA, 60 bp, Artificial Sequence
  Description of Artificial Sequence: targeting sequence/synthetic sequence
tctggcgtcaccacggaccaggtgcaggctgaggccaaagagtctgggcccacgacctac

SEQ ID NO: 4589 - DNA, 60 bp, Artificial Sequence
  Description of Artificial Sequence: targeting sequence/synthetic sequence
aaactttcagatggagtggctgtgctgaaggttggtgggacaagtgatgttgaagtgaat

SEQ ID NO: 4590 - DNA, 60 bp, Artificial Sequence
  Description of Artificial Sequence: targeting sequence/synthetic sequence
cctgagagtctcgtggaggaggagcgaccgagtggccctggtggtggcgggaagcagaga

SEQ ID NO: 4591 - DNA, 60 bp, Artificial Sequence
  Description of Artificial Sequence: targeting sequence/synthetic sequence
gttaacagtgtagggaaaatagagtgtgtatcagcagagaccaccgaagactgcatcgcc

SEQ ID NO: 4592 - DNA, 60 bp, Artificial Sequence
  Description of Artificial Sequence: targeting sequence/synthetic sequence
caccccgacaccggcatctcatcgaaggccatgggcatcatgaactccttcgtcaatgac

SEQ ID NO: 4593 - DNA, 60 bp, Artificial Sequence
  Description of Artificial Sequence: targeting sequence/synthetic sequence
aaaacccgctcccagctgctgataatggaccgggcagctgaccccgtgtccccactactg

SEQ ID NO: 4594 - DNA, 60 bp, Artificial Sequence
  Description of Artificial Sequence: targeting sequence/synthetic sequence
agcaacgaccagccccagaacgtggacagcgtgtgcagcggcaccctgcagaagaccgag

SEQ ID NO: 4595 - DNA, 60 bp, Artificial Sequence
  Description of Artificial Sequence: targeting sequence/synthetic sequence
cacctggccgaggaaaacgacggcgacaacgcctgcaagcggacctacagcgaccggggc

SEQ ID NO: 4596 - DNA, 60 bp, Artificial Sequence
  Description of Artificial Sequence: targeting sequence/synthetic sequence
agcatcgtgcgggtggccgacaccctgcccagcggccccagcaacagcgagagcatcccc

SEQ ID NO: 4597 - DNA, 60 bp, Artificial Sequence
  Description of Artificial Sequence: targeting sequence/synthetic sequence
gctgtgcgcctgctgctgcctggggagctggctaagcatgctgtgtccgagggcactaag

SEQ ID NO: 4598 - DNA, 60 bp, Artificial Sequence
  Description of Artificial Sequence: targeting sequence/synthetic sequence
aaagatgatgaggataccagagaggcattggtcaaaaaatttggtgctcagaatgtagct

SEQ ID NO: 4599 - DNA, 60 bp, Artificial Sequence
  Description of Artificial Sequence: targeting sequence/synthetic sequence
ccaacccttttccccctcgtctcctgtgagaattccccgtcggatacgagcagcgtggcc

SEQ ID NO: 4600 - DNA, 60 bp, Artificial Sequence
  Description of Artificial Sequence: targeting sequence/synthetic sequence
gcaggtgagcctggtaagaatggtgccaaaggagagcccggaccacgtggtgaacgcggt

SEQ ID NO: 4601 - DNA, 60 bp, Artificial Sequence
  Description of Artificial Sequence: targeting sequence/synthetic sequence
cccggacccgggcccgggcccgggcccggcgcagacatgcagcgcagctatgacagctac

SEQ ID NO: 4602 - DNA, 60 bp, Artificial Sequence
  Description of Artificial Sequence: targeting sequence/synthetic sequence
tgccccgagggcagctccatcagcgcccccagccagaccagcgtggacgtgagcctgatc

SEQ ID NO: 4603 - DNA, 60 bp, Artificial Sequence
  Description of Artificial Sequence: targeting sequence/synthetic sequence
attgagaagaatttgctgctacttggagccacagccatagaagatcgccttcaagcagga

SEQ ID NO: 4604 - DNA, 60 bp, Artificial Sequence
  Description of Artificial Sequence: targeting sequence/synthetic sequence
ctggatcagaagatgcgcccgagcactgacaccatcacagtcatggtggagaactctcac

SEQ ID NO: 4605 - DNA, 60 bp, Artificial Sequence
  Description of Artificial Sequence: targeting sequence/synthetic sequence
atgatctcccggacccctgaggtcacgtgcgtggtggtggacgtgagccaggaagacccc

SEQ ID NO: 4606 - DNA, 60 bp, Artificial Sequence
  Description of Artificial Sequence: targeting sequence/synthetic sequence
gtcaccacggaccaggtgcaggctgaggccaaagagtctgggcccacgacctacaaggtg

SEQ ID NO: 4607 - DNA, 60 bp, Artificial Sequence
  Description of Artificial Sequence: targeting sequence/synthetic sequence
gtggagcagacatccctggagcccctccaggagagcccccgtcccacaggtgtctggaag

SEQ ID NO: 4608 - DNA, 60 bp, Artificial Sequence
  Description of Artificial Sequence: targeting sequence/synthetic sequence
ggaggggcagtcacagagctgaccacggagctggccaacatggggaacctgtccacggat

SEQ ID NO: 4609 - DNA, 60 bp, Artificial Sequence
  Description of Artificial Sequence: targeting sequence/synthetic sequence
ctggtattgggatttgaggtccaggggacccaacagccccagcaagatgagatgcctagc

SEQ ID NO: 4610 - DNA, 60 bp, Artificial Sequence
  Description of Artificial Sequence: targeting sequence/synthetic sequence
gcaaaactttcagatggagtggctgtgctgaaggttggtgggacaagtgatgttgaagtg

SEQ ID NO: 4611 - DNA, 60 bp, Artificial Sequence
  Description of Artificial Sequence: targeting sequence/synthetic sequence
gacacccccaactgccccgacgcctccgacgaggctgcctgtgaaaaatacacgagtggc

SEQ ID NO: 4612 - DNA, 60 bp, Artificial Sequence
  Description of Artificial Sequence: targeting sequence/synthetic sequence
atcctgggccagctgcagcccgccctgcagaccggcagcgaggaactgaagagcctgtac

SEQ ID NO: 4613 - DNA, 60 bp, Artificial Sequence
  Description of Artificial Sequence: targeting sequence/synthetic sequence
gagtgggagagcagcgggcagccggagaacaactacaacaccacgcctcccatgctggac

SEQ ID NO: 4614 - DNA, 60 bp, Artificial Sequence
  Description of Artificial Sequence: targeting sequence/synthetic sequence
caccccgacaccggcatctcctctaaggccatgggaatcatgaactccttcgtcaacgac

SEQ ID NO: 4615 - DNA, 60 bp, Artificial Sequence
  Description of Artificial Sequence: targeting sequence/synthetic sequence
tgcaaggacaccgaggacatcgagcagaccgccaacatccagggcgaccccatcgccgac

SEQ ID NO: 4616 - DNA, 60 bp, Artificial Sequence
  Description of Artificial Sequence: targeting sequence/synthetic sequence
gaacatgagatgggtggccaccaccctggtgctgactatccagttgatgggctgccagat

SEQ ID NO: 4617 - DNA, 60 bp, Artificial Sequence
  Description of Artificial Sequence: targeting sequence/synthetic sequence
acggccgtacgcctgctgctgcccggggagctggctaagcacgccgtgtcagagggcacc

SEQ ID NO: 4618 - DNA, 60 bp, Artificial Sequence
  Description of Artificial Sequence: targeting sequence/synthetic sequence
gcagtcacagagctgaccacggagctggccaacatggggaacctgtccacggattcagca

SEQ ID NO: 4619 - DNA, 60 bp, Artificial Sequence
  Description of Artificial Sequence: targeting sequence/synthetic sequence
cctggtgctgacggccaacctggtgctaaaggcgaacctggtgatgctggtgctaaaggc

SEQ ID NO: 4620 - DNA, 60 bp, Artificial Sequence
  Description of Artificial Sequence: targeting sequence/synthetic sequence
ggggagccaggcagtgatggaatcccggggtcagcaggagagaagggtgaaccaggtcta

SEQ ID NO: 4621 - DNA, 60 bp, Artificial Sequence
  Description of Artificial Sequence: targeting sequence/synthetic sequence
ggcgccgctaccagccgggacgccctgcccaacaccgaggccagcggccccgcccacagc

SEQ ID NO: 4622 - DNA, 60 bp, Artificial Sequence
  Description of Artificial Sequence: targeting sequence/synthetic sequence
acagtagagcttgatgtgtcagatgaagagatggctagaagatatgagaccttggtgggg

SEQ ID NO: 4623 - DNA, 60 bp, Artificial Sequence
  Description of Artificial Sequence: targeting sequence/synthetic sequence
ggcttcctgaccacagccggcgccgctatgggcgccgctagcctgaccctgagcgcccag

SEQ ID NO: 4624 - DNA, 60 bp, Artificial Sequence
  Description of Artificial Sequence: targeting sequence/synthetic sequence
aaggtcctgagtttggcccaggagcaggtaggaggctcgcctgagaaactgcaggagaca

SEQ ID NO: 4625 - DNA, 60 bp, Artificial Sequence
  Description of Artificial Sequence: targeting sequence/synthetic sequence
tacgtgtacaaggtgctgaagcaggtccaccccgacaccggcatctcgtccaaggccatg

SEQ ID NO: 4626 - DNA, 60 bp, Artificial Sequence
  Description of Artificial Sequence: targeting sequence/synthetic sequence
gagggcgccatcggccgggtggccgacaccatccggagcggccccagcaacagcgaggcc

SEQ ID NO: 4627 - DNA, 60 bp, Artificial Sequence
  Description of Artificial Sequence: targeting sequence/synthetic sequence
acagagagaaccaccagcattgccaccaccaccaccaccaccacagagtctgtggaagag

SEQ ID NO: 4628 - DNA, 60 bp, Artificial Sequence
  Description of Artificial Sequence: targeting sequence/synthetic sequence
gtgcggctgctccgggacaccacacacatcagccagagcgccctgccccagggcatcgag

SEQ ID NO: 4629 - DNA, 60 bp, Artificial Sequence
  Description of Artificial Sequence: targeting sequence/synthetic sequence
ggagatgctggtcctgctggtcctaagggtgagcctggcagccctggtgaaaatggagct

SEQ ID NO: 4630 - DNA, 60 bp, Artificial Sequence
  Description of Artificial Sequence: targeting sequence/synthetic sequence
gtggagtttacagtgtctggcactgactgtgttgctaaagaggccacagaggcagccaag

SEQ ID NO: 4631 - DNA, 60 bp, Artificial Sequence
  Description of Artificial Sequence: targeting sequence/synthetic sequence
cagtcccaaggtatccagcagcttctgcaagctgagaagcgggcagctgagaaggtggca

SEQ ID NO: 4632 - DNA, 60 bp, Artificial Sequence
  Description of Artificial Sequence: targeting sequence/synthetic sequence
gtgtacgtgtacaaggtgctgaagcaggtccaccccgacaccggcatctcgtccaaggct

SEQ ID NO: 4633 - DNA, 60 bp, Artificial Sequence
  Description of Artificial Sequence: targeting sequence/synthetic sequence
ctggagccgactccttcttcccaggaagcacagagggccctggggacctccccagagctg

SEQ ID NO: 4634 - DNA, 60 bp, Artificial Sequence
  Description of Artificial Sequence: targeting sequence/synthetic sequence
atggaggacagcggccacgagaccggcatcgacagccagagccagggcagcttccaggcc

SEQ ID NO: 4635 - DNA, 60 bp, Artificial Sequence
  Description of Artificial Sequence: targeting sequence/synthetic sequence
agagtagctgcaggggtcctctgtgaacttgctcaggacaaggaagctgcagaagctatt

SEQ ID NO: 4636 - DNA, 60 bp, Artificial Sequence
  Description of Artificial Sequence: targeting sequence/synthetic sequence
cctgctggtgctgctggccctgctggaaaccctggtgctgatggacagcctggtgctaaa

SEQ ID NO: 4637 - DNA, 60 bp, Artificial Sequence
  Description of Artificial Sequence: targeting sequence/synthetic sequence
ccgcgtcacctccagctggccatccgcaacgatgaggagctcaacaagcttctgggcaaa

SEQ ID NO: 4638 - DNA, 60 bp, Artificial Sequence
  Description of Artificial Sequence: targeting sequence/synthetic sequence
ggtgtagagcagaccaaacagtgcaaggaggagcccaaggaggagaaggtggtgaagaca

SEQ ID NO: 4639 - DNA, 60 bp, Artificial Sequence
  Description of Artificial Sequence: targeting sequence/synthetic sequence
cggttccccgagtgccccgagggcagctccatcagcgcccccagccagaccagcgtggac

SEQ ID NO: 4640 - DNA, 60 bp, Artificial Sequence
  Description of Artificial Sequence: targeting sequence/synthetic sequence
gtggctctggctgtgatcctgcctgtcctggtacttctcatcatggtgtgcctttgcctt

SEQ ID NO: 4641 - DNA, 60 bp, Artificial Sequence
  Description of Artificial Sequence: targeting sequence/synthetic sequence
tgctcggagctgacccagtcgcaggcatcgctgcagtcggcgtcatctgtgggctctgcc

SEQ ID NO: 4642 - DNA, 60 bp, Artificial Sequence
  Description of Artificial Sequence: targeting sequence/synthetic sequence
tgccagcaaatcctgggccagctgcagcccgccctgaagaccggcaccgaggacctgcag

SEQ ID NO: 4643 - DNA, 60 bp, Artificial Sequence
  Description of Artificial Sequence: targeting sequence/synthetic sequence
gacgagaagatcttcgtggtcagcgccaccggcgagagccagatgctgacccggggccag

SEQ ID NO: 4644 - DNA, 60 bp, Artificial Sequence
  Description of Artificial Sequence: targeting sequence/synthetic sequence
gacgtcagcatgattcaggaatctgactgcggcgtgggagtggaaggaaaggaaggaaaa

SEQ ID NO: 4645 - DNA, 60 bp, Artificial Sequence
  Description of Artificial Sequence: targeting sequence/synthetic sequence
ggcgagcgggtggccggccagcccgtggtcctggacgtggccgctggcggaatcgacatc

SEQ ID NO: 4646 - DNA, 60 bp, Artificial Sequence
  Description of Artificial Sequence: targeting sequence/synthetic sequence
atgggctccagcatgccaccctctccctctaatgggtccagcttctccctgcccaccaat

SEQ ID NO: 4647 - DNA, 60 bp, Artificial Sequence
  Description of Artificial Sequence: targeting sequence/synthetic sequence
caccccgacaccggcatctcgtccaaggccatgggcatcatgaactccttcgtcaacgac

SEQ ID NO: 4648 - DNA, 60 bp, Artificial Sequence
  Description of Artificial Sequence: targeting sequence/synthetic sequence
ttccagctcacccagggagaccagctatccacccacacagatggcatcccccacctagtc

SEQ ID NO: 4649 - DNA, 60 bp, Artificial Sequence
  Description of Artificial Sequence: targeting sequence/synthetic sequence
cggtgctcggagctgacccagtcgcaggcatcgctgcagtcggcgtcatctgtgggctct

SEQ ID NO: 4650 - DNA, 60 bp, Artificial Sequence
  Description of Artificial Sequence: targeting sequence/synthetic sequence
gagatcaagatgaccaagatgtataaagggttccaagccttaggggatgccgctgacatc

SEQ ID NO: 4651 - DNA, 60 bp, Artificial Sequence
  Description of Artificial Sequence: targeting sequence/synthetic sequence
cagcgcatccatttccccagtgacaaagggcactgcgtggacctgccagacacaggactc

SEQ ID NO: 4652 - DNA, 60 bp, Artificial Sequence
  Description of Artificial Sequence: targeting sequence/synthetic sequence
acccgctcccagctgctgataatggaccgggcagctgaccccgtgtccccactactgcat

SEQ ID NO: 4653 - DNA, 60 bp, Artificial Sequence
  Description of Artificial Sequence: targeting sequence/synthetic sequence
accaccagcgccctgacccccggacctgccgctgccgctgccgacgccgcagcttcctcc

SEQ ID NO: 4654 - DNA, 60 bp, Artificial Sequence
  Description of Artificial Sequence: targeting sequence/synthetic sequence
cccgtgtgtggatccgacggtgtcacttatggtagcgcttgcgaactaagagaagccgcc

SEQ ID NO: 4655 - DNA, 60 bp, Artificial Sequence
  Description of Artificial Sequence: targeting sequence/synthetic sequence
gacggcgtggaggtgcacaacgccaagaccaagccccgggaggaacagtacaacagcacc

SEQ ID NO: 4656 - DNA, 60 bp, Artificial Sequence
  Description of Artificial Sequence: targeting sequence/synthetic sequence
cgttatgagatcaagatgaccaagatgtataaagggttccaagccttaggggatgccgct

SEQ ID NO: 4657 - DNA, 60 bp, Artificial Sequence
  Description of Artificial Sequence: targeting sequence/synthetic sequence
aagaagttgttggtagtggatccaaaggcacgttttacgacagaagaagccttaagacac

SEQ ID NO: 4658 - DNA, 60 bp, Artificial Sequence
  Description of Artificial Sequence: targeting sequence/synthetic sequence
attcaggaatctgactgcggcgtgggagtggaaggaaaggaaggaaaacaggcttcgttg

SEQ ID NO: 4659 - DNA, 60 bp, Artificial Sequence
  Description of Artificial Sequence: targeting sequence/synthetic sequence
acccaacccaccatccaacccacccaaccaactacccagctcccaacagattctcctacc

SEQ ID NO: 4660 - DNA, 60 bp, Artificial Sequence
  Description of Artificial Sequence: targeting sequence/synthetic sequence
ggcgaatcccgaggacactcagccactcagctgccagcggaaaaaactgtcgggggacca

SEQ ID NO: 4661 - DNA, 60 bp, Artificial Sequence
  Description of Artificial Sequence: targeting sequence/synthetic sequence
ctgtccccgccccccgagagctccgggagcccccagcagccgggcctgtccgccccccac

SEQ ID NO: 4662 - DNA, 60 bp, Artificial Sequence
  Description of Artificial Sequence: targeting sequence/synthetic sequence
tcagtgtatgtgtacaaggtgctgaagcaggtccatcccgacaccggcatctcttccaag

SEQ ID NO: 4663 - DNA, 60 bp, Artificial Sequence
  Description of Artificial Sequence: targeting sequence/synthetic sequence
gtggatggcgtggaggtgcataatgccaagacaaagccgcgggaggagcagttcaacagc

SEQ ID NO: 4664 - DNA, 60 bp, Artificial Sequence
  Description of Artificial Sequence: targeting sequence/synthetic sequence
gccaccaaccaggaccaggtgatcaagttcaccacagagggcgccaccagccagagctac

SEQ ID NO: 4665 - DNA, 60 bp, Artificial Sequence
  Description of Artificial Sequence: targeting sequence/synthetic sequence
cggttattaagaattttaggacgaaatgatgatgattcaagtgaagctatgaatgatata

SEQ ID NO: 4666 - DNA, 60 bp, Artificial Sequence
  Description of Artificial Sequence: targeting sequence/synthetic sequence
gtggtcttcgaggacgtgaagggcaccggcggagagagccgggacctgcccagcggccag

SEQ ID NO: 4667 - DNA, 60 bp, Artificial Sequence
  Description of Artificial Sequence: targeting sequence/synthetic sequence
gtcctgcccaacattcaggccgtgctactgcccaaaaagactgagagccaccacaaggcg

SEQ ID NO: 4668 - DNA, 60 bp, Artificial Sequence
  Description of Artificial Sequence: targeting sequence/synthetic sequence
ggcgccgctatgggcgccgctagcctgaccctgagcgcccagagccggaccctgttccgg

SEQ ID NO: 4669 - DNA, 60 bp, Artificial Sequence
  Description of Artificial Sequence: targeting sequence/synthetic sequence
ggcactatcgaagggctcatcaccaccaatgttggagacagcactttagcagatttattg

SEQ ID NO: 4670 - DNA, 60 bp, Artificial Sequence
  Description of Artificial Sequence: targeting sequence/synthetic sequence
ccccctggtgctgacggccaacctggtgctaaaggcgaacctggtgatgctggtgctaaa

SEQ ID NO: 4671 - DNA, 60 bp, Artificial Sequence
  Description of Artificial Sequence: targeting sequence/synthetic sequence
agccagccccaggacgtggacagcgtgtgcagcggcaccctgcagaagaccgaggacgtg

SEQ ID NO: 4672 - DNA, 60 bp, Artificial Sequence
  Description of Artificial Sequence: targeting sequence/synthetic sequence
gccaagggagatgctggtcctgctggtcctaagggtgagcctggcagccctggtgaaaat

SEQ ID NO: 4673 - DNA, 60 bp, Artificial Sequence
  Description of Artificial Sequence: targeting sequence/synthetic sequence
ttcctgggcgtgctgagcgccgctggcagcaccatgggcgccgctgccaccacactggcc

SEQ ID NO: 4674 - DNA, 60 bp, Artificial Sequence
  Description of Artificial Sequence: targeting sequence/synthetic sequence
gccaagggcctgtccaacccctctgaggtggagactctgcgagagaaggtttatgccacc

SEQ ID NO: 4675 - DNA, 60 bp, Artificial Sequence
  Description of Artificial Sequence: targeting sequence/synthetic sequence
cctcgtcacttgcaacttgctattcgtggagatgaagaattggattctctcatcaaggct

SEQ ID NO: 4676 - DNA, 60 bp, Artificial Sequence
  Description of Artificial Sequence: targeting sequence/synthetic sequence
cgcatccatttccccagtgacaaagggcactgcgtggacctgccagacacaggactctgc

SEQ ID NO: 4677 - DNA, 60 bp, Artificial Sequence
  Description of Artificial Sequence: targeting sequence/synthetic sequence
tacgtgtacaaggtgctgaaacaggtccaccccgacaccggcatctcctctaaagccatg

SEQ ID NO: 4678 - DNA, 60 bp, Artificial Sequence
  Description of Artificial Sequence: targeting sequence/synthetic sequence
ccgcgccacttgcagctggccatccgcaacgacgaggagctcaacaagctgctgggcaaa

SEQ ID NO: 4679 - DNA, 60 bp, Artificial Sequence
  Description of Artificial Sequence: targeting sequence/synthetic sequence
agtcagtctcaggggattcagcagctgctgcaggccgagaagcgggcagccgagaaggtg

SEQ ID NO: 4680 - DNA, 60 bp, Artificial Sequence
  Description of Artificial Sequence: targeting sequence/synthetic sequence
gctgctgctcctgcccctgcctcagtcccacagatatcccagccccccttcttgttggat

SEQ ID NO: 4681 - DNA, 60 bp, Artificial Sequence
  Description of Artificial Sequence: targeting sequence/synthetic sequence
atccttttcccagccacagatgccagctgtgaggacaagtcagctgccagagggctggcc

SEQ ID NO: 4682 - DNA, 60 bp, Artificial Sequence
  Description of Artificial Sequence: targeting sequence/synthetic sequence
agcaaggagagcgacagcgccagcgacggcatcacccaggccgctgccctgagcatcacc

SEQ ID NO: 4683 - DNA, 60 bp, Artificial Sequence
  Description of Artificial Sequence: targeting sequence/synthetic sequence
cagtgccccgacggcagagcattaggcccagcagggtgtgaggctgatgctagtgcccct

SEQ ID NO: 4684 - DNA, 60 bp, Artificial Sequence
  Description of Artificial Sequence: targeting sequence/synthetic sequence
agaactgctttattggatgctgctggtgtggcctctctgttaactacagcagaagttgta

SEQ ID NO: 4685 - DNA, 60 bp, Artificial Sequence
  Description of Artificial Sequence: targeting sequence/synthetic sequence
ccaggtgctgatggtgtcccagggaaagatggcccaaggggtcctactggtcctattggt

SEQ ID NO: 4686 - DNA, 60 bp, Artificial Sequence
  Description of Artificial Sequence: targeting sequence/synthetic sequence
gtccatcccgacaccggcatctcttccaaggcaatggggatcatgaattccttcgtcaac

SEQ ID NO: 4687 - DNA, 60 bp, Artificial Sequence
  Description of Artificial Sequence: targeting sequence/synthetic sequence
actgatgccagacggtccgaagactacgaactggccagcgtagaaaccgaggacagtgca

SEQ ID NO: 4688 - DNA, 60 bp, Artificial Sequence
  Description of Artificial Sequence: targeting sequence/synthetic sequence
aagaaggagatgatcatgtccgacgaggccgtggaggagaggcgggccttgatcaagcgg

SEQ ID NO: 4689 - DNA, 60 bp, Artificial Sequence
  Description of Artificial Sequence: targeting sequence/synthetic sequence
caggtggagcagacatccctggagcccctccaggagagcccccgtcccacaggtgtctgg

SEQ ID NO: 4690 - DNA, 60 bp, Artificial Sequence
  Description of Artificial Sequence: targeting sequence/synthetic sequence
caccccgacaccggcatctcttctaaggccatgggaatcatgaactccttcgtcaacgac

SEQ ID NO: 4691 - DNA, 60 bp, Artificial Sequence
  Description of Artificial Sequence: targeting sequence/synthetic sequence
atccaaagagtagctgcaggggtcctctgtgaacttgctcaggacaaggaagctgcagaa

SEQ ID NO: 4692 - DNA, 60 bp, Artificial Sequence
  Description of Artificial Sequence: targeting sequence/synthetic sequence
cgacaaggccgcaccattattctctctacacaccacatggatgaagcggacgtcctgggg

SEQ ID NO: 4693 - DNA, 60 bp, Artificial Sequence
  Description of Artificial Sequence: targeting sequence/synthetic sequence
ctcagttctcgtcctactcccagaactagcactgcagtggaagtaagtcctggtgaggat

SEQ ID NO: 4694 - DNA, 60 bp, Artificial Sequence
  Description of Artificial Sequence: targeting sequence/synthetic sequence
tacccccctgtggccaccaaccaggaccaggtgatcaagttcaccacagagggcgccacc

SEQ ID NO: 4695 - DNA, 60 bp, Artificial Sequence
  Description of Artificial Sequence: targeting sequence/synthetic sequence
cccctggagttcaagagggagctgactggccagcgactccgggagggagatggccccgac

SEQ ID NO: 4696 - DNA, 60 bp, Artificial Sequence
  Description of Artificial Sequence: targeting sequence/synthetic sequence
ggtagtcctggtggtaaaggcgaaatgggtcccgctggcattcctggagctcctggactg

SEQ ID NO: 4697 - DNA, 60 bp, Artificial Sequence
  Description of Artificial Sequence: targeting sequence/synthetic sequence
atcagccggacccccgaggtgacctgcgtggtcgtggacgtgagccacgaggaccccgag

SEQ ID NO: 4698 - DNA, 60 bp, Artificial Sequence
  Description of Artificial Sequence: targeting sequence/synthetic sequence
atcaaattcaaaggcgtggacaatgaggatgaccatggccgtggagatctggggcgcctc

SEQ ID NO: 4699 - DNA, 60 bp, Artificial Sequence
  Description of Artificial Sequence: targeting sequence/synthetic sequence
cgatttgatcttacccaaattcctcatggagaggcagtgacagcagctgaattccggata

SEQ ID NO: 4700 - DNA, 60 bp, Artificial Sequence
  Description of Artificial Sequence: targeting sequence/synthetic sequence
aagcagggctacatcagcaaggagagcgacagcgccagcgacggcatcacccaggccgct

SEQ ID NO: 4701 - DNA, 60 bp, Artificial Sequence
  Description of Artificial Sequence: targeting sequence/synthetic sequence
tccgtatacgtgtacaaggtgctgaagcaggtccaccccgacaccggcatctcctctaag

SEQ ID NO: 4702 - DNA, 60 bp, Artificial Sequence
  Description of Artificial Sequence: targeting sequence/synthetic sequence
gccctgacccccggacctgccgctgccgctgccgacgccgcagcttcctccgttgccaag

SEQ ID NO: 4703 - DNA, 60 bp, Artificial Sequence
  Description of Artificial Sequence: targeting sequence/synthetic sequence
ttcaagttcaacttatcccagattcctgagggtgaggtggtgacggctgcagaattccgc

SEQ ID NO: 4704 - DNA, 60 bp, Artificial Sequence
  Description of Artificial Sequence: targeting sequence/synthetic sequence
atcctggtgcagctgcagcccgccctgcagaccggcaccgaggaaatcaagagcctgtac

SEQ ID NO: 4705 - DNA, 60 bp, Artificial Sequence
  Description of Artificial Sequence: targeting sequence/synthetic sequence
ctgcccaacatccaggccgtgctactgcccaagaagaccgagagccaccacaaggcgaag

SEQ ID NO: 4706 - DNA, 60 bp, Artificial Sequence
  Description of Artificial Sequence: targeting sequence/synthetic sequence
tgccccgccacatgtcgcggcgcaccagagggaactgtgtgtggctctgatggagccgac

SEQ ID NO: 4707 - DNA, 60 bp, Artificial Sequence
  Description of Artificial Sequence: targeting sequence/synthetic sequence
ctgtgcaaggacaccgaggacatcgagcagagcgccaacatccagggcgacggcatcgcc

SEQ ID NO: 4708 - DNA, 60 bp, Artificial Sequence
  Description of Artificial Sequence: targeting sequence/synthetic sequence
gcccatggggtacaaacagagagttctacagttactccaacattaccaggtgaaactctc

SEQ ID NO: 4709 - DNA, 60 bp, Artificial Sequence
  Description of Artificial Sequence: targeting sequence/synthetic sequence
gcaaacaaacgtatgaaagtaaaacatgatgatcactatgagttaatagtagatggaagg

SEQ ID NO: 4710 - DNA, 60 bp, Artificial Sequence
  Description of Artificial Sequence: targeting sequence/synthetic sequence
actatcgaagggctcatcaccaccaatgttggagacagcactttagcagatttattggat

SEQ ID NO: 4711 - DNA, 60 bp, Artificial Sequence
  Description of Artificial Sequence: targeting sequence/synthetic sequence
tgtgacgacacccccaactgccccgacgcctccgacgaggctgcctgtgaaaaatacacg

SEQ ID NO: 4712 - DNA, 60 bp, Artificial Sequence
  Description of Artificial Sequence: targeting sequence/synthetic sequence
tacgagggcgacgccctgctcgcccagctgtaccgggacaagaccgccgctgagggcgcc

SEQ ID NO: 4713 - DNA, 60 bp, Artificial Sequence
  Description of Artificial Sequence: targeting sequence/synthetic sequence
caccacaaagagttcaagttcaacttatcccagattcctgagggtgaggtggtgacggct

SEQ ID NO: 4714 - DNA, 60 bp, Artificial Sequence
  Description of Artificial Sequence: targeting sequence/synthetic sequence
cgcggcgcaccagagggaactgtgtgtggctctgatggagccgactaccccggcgagtgc

SEQ ID NO: 4715 - DNA, 60 bp, Artificial Sequence
  Description of Artificial Sequence: targeting sequence/synthetic sequence
tctgtgtacgtgtacaaggtgctgaaacaggtccatcccgacactggcatctcttccaag

SEQ ID NO: 4716 - DNA, 60 bp, Artificial Sequence
  Description of Artificial Sequence: targeting sequence/synthetic sequence
agccggcgctttgaggagacccgtggcatggaggaggagcccacccacctgcctctggtt

SEQ ID NO: 4717 - DNA, 60 bp, Artificial Sequence
  Description of Artificial Sequence: targeting sequence/synthetic sequence
caggggctgccactgtccaatttcgtgccacccccaccctcgcccgccccatctgactcg

SEQ ID NO: 4718 - DNA, 60 bp, Artificial Sequence
  Description of Artificial Sequence: targeting sequence/synthetic sequence
ccgcgccacttgcagctggccatccgcaacgacgaggagctcaacaaactgctaggccgg

SEQ ID NO: 4719 - DNA, 60 bp, Artificial Sequence
  Description of Artificial Sequence: targeting sequence/synthetic sequence
tatccaggaagtcctgggctacctggagaaaaaggtgacaaaggcctcccaggattggat

SEQ ID NO: 4720 - DNA, 60 bp, Artificial Sequence
  Description of Artificial Sequence: targeting sequence/synthetic sequence
ttgcggttattaagaattttaggacgaaatgatgatgattcaagtgaagctatgaatgat

SEQ ID NO: 4721 - DNA, 60 bp, Artificial Sequence
  Description of Artificial Sequence: targeting sequence/synthetic sequence
cttcccggaccccccggaccccccggacctcccggaccccctggcctcggaggaaacttt

SEQ ID NO: 4722 - DNA, 60 bp, Artificial Sequence
  Description of Artificial Sequence: targeting sequence/synthetic sequence
gtcaagaagttgttggtagtggatccaaaggcacgttttacgacagaagaagccttaaga

SEQ ID NO: 4723 - DNA, 60 bp, Artificial Sequence
  Description of Artificial Sequence: targeting sequence/synthetic sequence
attcaggcagtgctgctgcccaagaagactgagagtcaccaccataaagcccaaagcaag

SEQ ID NO: 4724 - DNA, 60 bp, Artificial Sequence
  Description of Artificial Sequence: targeting sequence/synthetic sequence
cccggctgcatgctgatccagaagcagaagccctacaccggcgaggccgacgatcaccat

SEQ ID NO: 4725 - DNA, 60 bp, Artificial Sequence
  Description of Artificial Sequence: targeting sequence/synthetic sequence
aacgaggacggcggagagaagaacatggaggacagcggccacgagaccggcatcgacagc

SEQ ID NO: 4726 - DNA, 60 bp, Artificial Sequence
  Description of Artificial Sequence: targeting sequence/synthetic sequence
gggggcctcccgcccccccagagaacacagcgcagcacggaaattctacaagacctgacg

SEQ ID NO: 4727 - DNA, 60 bp, Artificial Sequence
  Description of Artificial Sequence: targeting sequence/synthetic sequence
cgtcctactcccagaactagcactgcagtggaagtaagtcctggtgaggatatgactcac

SEQ ID NO: 4728 - DNA, 60 bp, Artificial Sequence
  Description of Artificial Sequence: targeting sequence/synthetic sequence
ggcatccctggcccacaaggttcacctggcttacctggagacaaaggtgcaaaaggagag

SEQ ID NO: 4729 - DNA, 60 bp, Artificial Sequence
  Description of Artificial Sequence: targeting sequence/synthetic sequence
tgtggccagtgccccgacggcagagcattaggcccagcagggtgtgaggctgatgctagt

SEQ ID NO: 4730 - DNA, 60 bp, Artificial Sequence
  Description of Artificial Sequence: targeting sequence/synthetic sequence
gaagatgaaacagtagagcttgatgtgtcagatgaagagatggctagaagatatgagacc

SEQ ID NO: 4731 - DNA, 60 bp, Artificial Sequence
  Description of Artificial Sequence: targeting sequence/synthetic sequence
agttctcgtcctactcccagaactagcactgcagtggaagtaagtcctggtgaggatatg

SEQ ID NO: 4732 - DNA, 60 bp, Artificial Sequence
  Description of Artificial Sequence: targeting sequence/synthetic sequence
gtgaccatcgctcagggcggcgtcctgcccaacatccaggccgtgctgctgcccaagaag

SEQ ID NO: 4733 - DNA, 60 bp, Artificial Sequence
  Description of Artificial Sequence: targeting sequence/synthetic sequence
tctgtctccatgactgtgaagagcatcgtcttggagaaggagttgcgactgaaggagacc

SEQ ID NO: 4734 - DNA, 60 bp, Artificial Sequence
  Description of Artificial Sequence: targeting sequence/synthetic sequence
ccaggcactcccggcagccgctcccgcaccccgtcccttccaaccccacccacccgggag

SEQ ID NO: 4735 - DNA, 60 bp, Artificial Sequence
  Description of Artificial Sequence: targeting sequence/synthetic sequence
aagtttgctattggttcagcaagagaggcagacccagctctcaatgttgaaacagaaata

SEQ ID NO: 4736 - DNA, 60 bp, Artificial Sequence
  Description of Artificial Sequence: targeting sequence/synthetic sequence
accagcattgccaccaccaccaccaccaccacagagtctgtggaagaggtggttcgagag

SEQ ID NO: 4737 - DNA, 60 bp, Artificial Sequence
  Description of Artificial Sequence: targeting sequence/synthetic sequence
gtgcggctgctccgggacacccccttcatcacccagcaagccctgtaccagaacgacccc

SEQ ID NO: 4738 - DNA, 60 bp, Artificial Sequence
  Description of Artificial Sequence: targeting sequence/synthetic sequence
ggtgtcttgcccaatatccaggccgtgctgctgcctaagaagactgagagccaccataag

SEQ ID NO: 4739 - DNA, 60 bp, Artificial Sequence
  Description of Artificial Sequence: targeting sequence/synthetic sequence
aggccctactcaatacatgcccatggggtacaaacagagagttctacagttactccaaca

SEQ ID NO: 4740 - DNA, 60 bp, Artificial Sequence
  Description of Artificial Sequence: targeting sequence/synthetic sequence
ggaggcgtcctgcccaacatccaggccgtgctgctgcccaagaagaccagcgccaccgtg

SEQ ID NO: 4741 - DNA, 60 bp, Artificial Sequence
  Description of Artificial Sequence: targeting sequence/synthetic sequence
acaccccggcacatcctgctggctgtggccaatgatgaagagctgaatcagctgctaaaa

SEQ ID NO: 4742 - DNA, 60 bp, Artificial Sequence
  Description of Artificial Sequence: targeting sequence/synthetic sequence
ctccttggaaggatgctggtgctggacagtgaccagagggtcagtgcagctgaggcactg

SEQ ID NO: 4743 - DNA, 60 bp, Artificial Sequence
  Description of Artificial Sequence: targeting sequence/synthetic sequence
agaagaactacatataaactacaagtcaaaaatgaagaggtaaagaatatgtcacttgaa

SEQ ID NO: 4744 - DNA, 60 bp, Artificial Sequence
  Description of Artificial Sequence: targeting sequence/synthetic sequence
ccctactcaatacatgcccatggggtacaaacagagagttctacagttactccaacatta

SEQ ID NO: 4745 - DNA, 60 bp, Artificial Sequence
  Description of Artificial Sequence: targeting sequence/synthetic sequence
gaactgagaagaactacatataaactacaagtcaaaaatgaagaggtaaagaatatgtca

SEQ ID NO: 4746 - DNA, 60 bp, Artificial Sequence
  Description of Artificial Sequence: targeting sequence/synthetic sequence
ggtgtcaggggattgcacaaatcactcaccgacgtggccctggagcaccatgaggagtgt

SEQ ID NO: 4747 - DNA, 60 bp, Artificial Sequence
  Description of Artificial Sequence: targeting sequence/synthetic sequence
atgggcgccgctagcctgaccctgagcgcccagagccggaccctgctcgccggcatcgtg

SEQ ID NO: 4748 - DNA, 60 bp, Artificial Sequence
  Description of Artificial Sequence: targeting sequence/synthetic sequence
gccgtggtcaaggtgaagcggaacaagccccctctgcccagcgtgcagcggctgaccgag

SEQ ID NO: 4749 - DNA, 60 bp, Artificial Sequence
  Description of Artificial Sequence: targeting sequence/synthetic sequence
ttattggatgctgctggtgtggcctctctgttaactacagcagaagttgtagtcacagaa

SEQ ID NO: 4750 - DNA, 60 bp, Artificial Sequence
  Description of Artificial Sequence: targeting sequence/synthetic sequence
ggctgccggcagatcctgggccagctgcagcccagcctgaagaccggcagcgaggaaatc

SEQ ID NO: 4751 - DNA, 60 bp, Artificial Sequence
  Description of Artificial Sequence: targeting sequence/synthetic sequence
atacatgcccatggggtacaaacagagagttctacagttactccaacattaccaggtgaa

SEQ ID NO: 4752 - DNA, 60 bp, Artificial Sequence
  Description of Artificial Sequence: targeting sequence/synthetic sequence
ttcagagtctgcctgaagcctgggctctcagaggaggccgccgagtccccgtgcgccctg

SEQ ID NO: 4753 - DNA, 60 bp, Artificial Sequence
  Description of Artificial Sequence: targeting sequence/synthetic sequence
agacggtccgaagactacgaactggccagcgtagaaaccgaggacagtgcaagcgaaaac

SEQ ID NO: 4754 - DNA, 60 bp, Artificial Sequence
  Description of Artificial Sequence: targeting sequence/synthetic sequence
acccccggctgcatgctgatccagaagcagaagccctacaccggcgaggccgacgatcac

SEQ ID NO: 4755 - DNA, 60 bp, Artificial Sequence
  Description of Artificial Sequence: targeting sequence/synthetic sequence
gtgggcgccaagaaacggaagccccctctgcccagcgtgaccaagctgaccgaggaccgg

SEQ ID NO: 4756 - DNA, 60 bp, Artificial Sequence
  Description of Artificial Sequence: targeting sequence/synthetic sequence
ctgctggcaggcctgtgctgcctggtccctgtctccctggctgaggatccccagggagat

SEQ ID NO: 4757 - DNA, 60 bp, Artificial Sequence
  Description of Artificial Sequence: targeting sequence/synthetic sequence
gaatttgatgggaagagcctggtctcagttaccaaggagggtctggagctgcctgaggat

SEQ ID NO: 4758 - DNA, 60 bp, Artificial Sequence
  Description of Artificial Sequence: targeting sequence/synthetic sequence
ttgcctggtttcgctggaaatcccggaccaccaggcttaccagggatgaagggtgatcca

SEQ ID NO: 4759 - DNA, 60 bp, Artificial Sequence
  Description of Artificial Sequence: targeting sequence/synthetic sequence
accacccaacccaccatccaacccacccaaccaactacccagctcccaacagattctcct

SEQ ID NO: 4760 - DNA, 60 bp, Artificial Sequence
  Description of Artificial Sequence: targeting sequence/synthetic sequence
tgtgccatggagagccggcgctttgaggagacccgtggcatggaggaggagcccacccac

SEQ ID NO: 4761 - DNA, 60 bp, Artificial Sequence
  Description of Artificial Sequence: targeting sequence/synthetic sequence
tcgctgtccccgccccccgagagctccgggagcccccagcagccgggcctgtccgccccc

SEQ ID NO: 4762 - DNA, 60 bp, Artificial Sequence
  Description of Artificial Sequence: targeting sequence/synthetic sequence
ggcactcccggcagccgctcccgcaccccgtcccttccaaccccacccacccgggagccc

SEQ ID NO: 4763 - DNA, 60 bp, Artificial Sequence
  Description of Artificial Sequence: targeting sequence/synthetic sequence
agcaacggccagcccgagaacaattacaagaccacaccccctgtgctggacagcgacggc

SEQ ID NO: 4764 - DNA, 60 bp, Artificial Sequence
  Description of Artificial Sequence: targeting sequence/synthetic sequence
ggtgaaggtggtgcccccggacttccaggtatagctggacctcgtggtagccctggtgag

SEQ ID NO: 4765 - DNA, 60 bp, Artificial Sequence
  Description of Artificial Sequence: targeting sequence/synthetic sequence
ccaggccgtgatggcagagatggcacccctggtgagaagggtgagaaaggagatccaggt

SEQ ID NO: 4766 - DNA, 60 bp, Artificial Sequence
  Description of Artificial Sequence: targeting sequence/synthetic sequence
tttgatgggaagagcctggtctcagttaccaaggagggtctggagctgcctgaggatgag

SEQ ID NO: 4767 - DNA, 60 bp, Artificial Sequence
  Description of Artificial Sequence: targeting sequence/synthetic sequence
ggctgccagcaaatcctggtgcagctgcagcccgccctgcagaccggcacccaggagatc

SEQ ID NO: 4768 - DNA, 60 bp, Artificial Sequence
  Description of Artificial Sequence: targeting sequence/synthetic sequence
gagggctgccggcagatcctgggccagctgcagagctccctgcagaccggcagcgaggaa

SEQ ID NO: 4769 - DNA, 60 bp, Artificial Sequence
  Description of Artificial Sequence: targeting sequence/synthetic sequence
tgccagaagatcctgcgggtgctggaccccctggtgcccaccggcagcgagaacctgaag

SEQ ID NO: 4770 - DNA, 60 bp, Artificial Sequence
  Description of Artificial Sequence: targeting sequence/synthetic sequence
agcagtagcctggagccgactccttcttcccaggaagcacagagggccctggggacctcc

SEQ ID NO: 4771 - DNA, 60 bp, Artificial Sequence
  Description of Artificial Sequence: targeting sequence/synthetic sequence
ttcttcagagtctgcctgaagcctgggctctcagaggaggccgccgagtccccgtgcgcc

SEQ ID NO: 4772 - DNA, 60 bp, Artificial Sequence
  Description of Artificial Sequence: targeting sequence/synthetic sequence
gtagagcagaccaaacagtgcaaggaggagcccaaggaggagaaggtggtgaagacagag

SEQ ID NO: 4773 - DNA, 60 bp, Artificial Sequence
  Description of Artificial Sequence: targeting sequence/synthetic sequence
ggctgcgtgcagatcatgaagcagctgcagcccgccctgaccggcaccgaggaactgcgg

SEQ ID NO: 4774 - DNA, 60 bp, Artificial Sequence
  Description of Artificial Sequence: targeting sequence/synthetic sequence
ggggtcatcacgctctacgagatcaactacaaggctgtcggctcgctggacccaagtgct

SEQ ID NO: 4775 - DNA, 60 bp, Artificial Sequence
  Description of Artificial Sequence: targeting sequence/synthetic sequence
aacaacatctactgcatggcccagctgctggacaactcagacacggctgagcccacgaag

SEQ ID NO: 4776 - DNA, 60 bp, Artificial Sequence
  Description of Artificial Sequence: targeting sequence/synthetic sequence
ataatagaaattaagccattcagcgacggaggagatggcagcagcagtgaacaaattcga

SEQ ID NO: 4777 - DNA, 60 bp, Artificial Sequence
  Description of Artificial Sequence: targeting sequence/synthetic sequence
gagggctgccagaagatcattagcgtgctggagcccctggtgcccaccggcagcgagaac

SEQ ID NO: 4778 - DNA, 60 bp, Artificial Sequence
  Description of Artificial Sequence: targeting sequence/synthetic sequence
cccacgaaggctggccggggggcctctcagccgcccacccccacccctgcctcggatgct

SEQ ID NO: 4779 - DNA, 60 bp, Artificial Sequence
  Description of Artificial Sequence: targeting sequence/synthetic sequence
gtgatggaaatcaaattcaaaggcgtggacaatgaggatgaccatggccgtggagatctg

SEQ ID NO: 4780 - DNA, 60 bp, Artificial Sequence
  Description of Artificial Sequence: targeting sequence/synthetic sequence
acgaaggctggccggggggcctctcagccgcccacccccacccctgcctcggatgctttt

SEQ ID NO: 4781 - DNA, 60 bp, Artificial Sequence
  Description of Artificial Sequence: targeting sequence/synthetic sequence
cccagcagggcctgcacctgtgtcccaccccacccacagacggccttctgcaattccgac

SEQ ID NO: 4782 - DNA, 60 bp, Artificial Sequence
  Description of Artificial Sequence: targeting sequence/synthetic sequence
acggatggccacgtggctgcggggtcgactttagccaggcggaaaaggagcgccggggct

SEQ ID NO: 4783 - DNA, 60 bp, Artificial Sequence
  Description of Artificial Sequence: targeting sequence/synthetic sequence
tacatggactacggctgctactgcggcgccggcggaagcggcacccccgtggacgagctg

SEQ ID NO: 4784 - DNA, 60 bp, Artificial Sequence
  Description of Artificial Sequence: targeting sequence/synthetic sequence
ctggcaggcctgtgctgcctggtccctgtctccctggctgaggatccccagggagatgct

SEQ ID NO: 4785 - DNA, 60 bp, Artificial Sequence
  Description of Artificial Sequence: targeting sequence/synthetic sequence
ctcaggaacaacatctactgcatggcccagctgctggacaactcagacacggctgagccc

SEQ ID NO: 4786 - DNA, 60 bp, Artificial Sequence
  Description of Artificial Sequence: targeting sequence/synthetic sequence
aaggagggctgccagaagatcattagcgtgctggagcccctggtgcccaccggcagcgag

SEQ ID NO: 4787 - DNA, 60 bp, Artificial Sequence
  Description of Artificial Sequence: targeting sequence/synthetic sequence
gacgtgggcttcgccatgggcatcgcagggaccgacgtggccaaggaggcctccgacatc

SEQ ID NO: 4788 - DNA, 60 bp, Artificial Sequence
  Description of Artificial Sequence: targeting sequence/synthetic sequence
tttccagggccccccggccccaaaggtgttgacggcttacctggagacatggggccacca

SEQ ID NO: 4789 - DNA, 60 bp, Artificial Sequence
  Description of Artificial Sequence: targeting sequence/synthetic sequence
tctcaggggatccaccagcttcttcaggcagaaaaacgggccaaggacaagctagaggaa

SEQ ID NO: 4790 - DNA, 60 bp, Artificial Sequence
  Description of Artificial Sequence: targeting sequence/synthetic sequence
acaggcgaaagcagtagcctggagccgactccttcttcccaggaagcacagagggccctg

SEQ ID NO: 4791 - DNA, 60 bp, Artificial Sequence
  Description of Artificial Sequence: targeting sequence/synthetic sequence
gccgacgagaagatcttcgtggtcagcgccaccggcgagagccagatgctgacccggggc

SEQ ID NO: 4792 - DNA, 60 bp, Artificial Sequence
  Description of Artificial Sequence: targeting sequence/synthetic sequence
tacagctcctacggctgctactgcggcgccggcggacagggctggccccaggacgccagc

SEQ ID NO: 4793 - DNA, 60 bp, Artificial Sequence
  Description of Artificial Sequence: targeting sequence/synthetic sequence
agccgaatggacagcacgggggttagtggccggatccaagtcccagaggagacctatctc

SEQ ID NO: 4794 - DNA, 60 bp, Artificial Sequence
  Description of Artificial Sequence: targeting sequence/synthetic sequence
gagttcaagagggagctgactggccagcgactccgggagggagatggccccgacggccct

SEQ ID NO: 4795 - DNA, 60 bp, Artificial Sequence
  Description of Artificial Sequence: targeting sequence/synthetic sequence
aaggagctggcagaactccgagagtctaccagccagatgcacacagcatcatctttggag

SEQ ID NO: 4796 - DNA, 60 bp, Artificial Sequence
  Description of Artificial Sequence: targeting sequence/synthetic sequence
gaaaacattcacgaggtgatggaaatcaaattcaaaggcgtggacaatgaggatgaccat

SEQ ID NO: 4797 - DNA, 60 bp, Artificial Sequence
  Description of Artificial Sequence: targeting sequence/synthetic sequence
ccagctggccagaaaggggagccaggcagtgatggaatcccggggtcagcaggagagaag

SEQ ID NO: 4798 - DNA, 60 bp, Artificial Sequence
  Description of Artificial Sequence: targeting sequence/synthetic sequence
gaggtgatggaaatcaaattcaaaggcgtggacaatgaggatgaccatggccgtggagat

SEQ ID NO: 4799 - DNA, 60 bp, Artificial Sequence
  Description of Artificial Sequence: targeting sequence/synthetic sequence
ggaagtcctggtccaaagggtgacaagggtgaaccaggcggtccaggtgctgatggtgtc

SEQ ID NO: 4800 - DNA, 60 bp, Artificial Sequence
  Description of Artificial Sequence: targeting sequence/synthetic sequence
gccgacgcctgcagctgctccccggtgcacccgcaacaggcgttttgcaatgcagatgta

SEQ ID NO: 4801 - DNA, 60 bp, Artificial Sequence
  Description of Artificial Sequence: targeting sequence/synthetic sequence
attgaaataagaacagtcagtgatggtggagatggaagcagcagtgaggaaattaggatt

SEQ ID NO: 4802 - DNA, 60 bp, Artificial Sequence
  Description of Artificial Sequence: targeting sequence/synthetic sequence
caaggccgcaccattattctctctacacaccacatggatgaagcggacgtcctgggggac

SEQ ID NO: 4803 - DNA, 60 bp, Artificial Sequence
  Description of Artificial Sequence: targeting sequence/synthetic sequence
tccttcacacaggggctgccactgtccaatttcgtgccacccccaccctcgcccgcccca

SEQ ID NO: 4804 - DNA, 60 bp, Artificial Sequence
  Description of Artificial Sequence: targeting sequence/synthetic sequence
acacaggggctgccactgtccaatttcgtgccacccccaccctcgcccgccccatctgac

SEQ ID NO: 4805 - DNA, 60 bp, Artificial Sequence
  Description of Artificial Sequence: targeting sequence/synthetic sequence
ccactgtccaatttcgtgccacccccaccctcgcccgccccatctgactcgccagcgtcc

SEQ ID NO: 4806 - DNA, 60 bp, Artificial Sequence
  Description of Artificial Sequence: targeting sequence/synthetic sequence
tccaatttcgtgccacccccaccctcgcccgccccatctgactcgccagcgtccccggat

SEQ ID NO: 4807 - DNA, 60 bp, Artificial Sequence
  Description of Artificial Sequence: targeting sequence/synthetic sequence
ttcgtgccacccccaccctcgcccgccccatctgactcgccagcgtccccggatgaggac

SEQ ID NO: 4808 - DNA, 60 bp, Artificial Sequence
  Description of Artificial Sequence: targeting sequence/synthetic sequence
ccacccccaccctcgcccgccccatctgactcgccagcgtccccggatgaggacctgcag

SEQ ID NO: 4809 - DNA, 60 bp, Artificial Sequence
  Description of Artificial Sequence: targeting sequence/synthetic sequence
gaacccaccacacaacccaccacagagcccaccacccaacccaccatccaacccacccaa

SEQ ID NO: 4810 - DNA, 60 bp, Artificial Sequence
  Description of Artificial Sequence: targeting sequence/synthetic sequence
acacaacccaccacagagcccaccacccaacccaccatccaacccacccaaccaactacc

SEQ ID NO: 4811 - DNA, 60 bp, Artificial Sequence
  Description of Artificial Sequence: targeting sequence/synthetic sequence
tccagcaattacatcaacgcagcactgatggatagccacaagcagcctgccgccttcgtg

SEQ ID NO: 4812 - DNA, 60 bp, Artificial Sequence
  Description of Artificial Sequence: targeting sequence/synthetic sequence
atcgtggagaagaccaagcagaccctggccagcgtgagctccggccccaagcacacccag

SEQ ID NO: 4813 - DNA, 60 bp, Artificial Sequence
  Description of Artificial Sequence: targeting sequence/synthetic sequence
ttctctgggctgtctgctgagctccggaaccagctggacgtggccaaggtctcccagcag

SEQ ID NO: 4814 - DNA, 60 bp, Artificial Sequence
  Description of Artificial Sequence: targeting sequence/synthetic sequence
gtggagggcaaggtacaggggctggtcccagccggcggctccagctccaacagcacccga

SEQ ID NO: 4815 - DNA, 60 bp, Artificial Sequence
  Description of Artificial Sequence: targeting sequence/synthetic sequence
cccctgacccccgccaacaatctgcccgacacccagagctccggccccgcccacagcaag

SEQ ID NO: 4816 - DNA, 60 bp, Artificial Sequence
  Description of Artificial Sequence: targeting sequence/synthetic sequence
cccctatcggtgggggtgcagctccaggatgtgccccgaggacaggtagtgaaaggatca

SEQ ID NO: 4817 - DNA, 60 bp, Artificial Sequence
  Description of Artificial Sequence: targeting sequence/synthetic sequence
gcaaagtcagagaacttggtgaagagccatgtccagctgcaaaattattcaaaggtggaa

SEQ ID NO: 4818 - DNA, 60 bp, Artificial Sequence
  Description of Artificial Sequence: targeting sequence/synthetic sequence
cggagattcgtgcagaacgccctgaacggcaacggcgacagcaacaatatggaccgggcc

SEQ ID NO: 4819 - DNA, 60 bp, Artificial Sequence
  Description of Artificial Sequence: targeting sequence/synthetic sequence
gtgcagaagctgaagcagctgcccgtgatcgagagccagatcaacaccatcgagcacagc

SEQ ID NO: 4820 - DNA, 60 bp, Artificial Sequence
  Description of Artificial Sequence: targeting sequence/synthetic sequence
tcggagaaagcgctccagagcaaccactttgagctctctttacgtacagaagcaacgcag

SEQ ID NO: 4821 - DNA, 60 bp, Artificial Sequence
  Description of Artificial Sequence: targeting sequence/synthetic sequence
aaaccagaagaaaataaaattcgtcaggaagatttaacaaaaattataagtagtgctcag

SEQ ID NO: 4822 - DNA, 60 bp, Artificial Sequence
  Description of Artificial Sequence: targeting sequence/synthetic sequence
ctcctccagggcgcctctaagctccaagaattgcacctctccagcaatgggctggaaagc

SEQ ID NO: 4823 - DNA, 60 bp, Artificial Sequence
  Description of Artificial Sequence: targeting sequence/synthetic sequence
agcatcgtgaacgccaacaccgtgctggacgatctgaacagccggatgccccagagccgg

SEQ ID NO: 4824 - DNA, 60 bp, Artificial Sequence
  Description of Artificial Sequence: targeting sequence/synthetic sequence
ctgagcgacaacgacaccttcgccgctagcgagcacggcaagcggcagaactaccccaag

SEQ ID NO: 4825 - DNA, 60 bp, Artificial Sequence
  Description of Artificial Sequence: targeting sequence/synthetic sequence
gtcatgcattcccagagcaccaatcagcttgatgtggggaacaatccccgtgtgggcacc

SEQ ID NO: 4826 - DNA, 60 bp, Artificial Sequence
  Description of Artificial Sequence: targeting sequence/synthetic sequence
gattcgaagaactcagtgcatctccaaatgaacagcctcaaaaccgacgacacggccgtg

SEQ ID NO: 4827 - DNA, 60 bp, Artificial Sequence
  Description of Artificial Sequence: targeting sequence/synthetic sequence
gagaatgtaatccgcgatgcagttacctacacggagcacgccaaacgcaagacagtcaca

SEQ ID NO: 4828 - DNA, 60 bp, Artificial Sequence
  Description of Artificial Sequence: targeting sequence/synthetic sequence
gccaacctcctccagggcgcctctaagctccaagaattgcacctctccagcaatgggctg

SEQ ID NO: 4829 - DNA, 60 bp, Artificial Sequence
  Description of Artificial Sequence: targeting sequence/synthetic sequence
tcttccaagtccgctaataccatcaccagctttgtggacaggggactggacgatctgtcc

SEQ ID NO: 4830 - DNA, 60 bp, Artificial Sequence
  Description of Artificial Sequence: targeting sequence/synthetic sequence
gcccccgccaacacctacaacaataacatcgagggccaggccatcgtgtaccagagcaag

SEQ ID NO: 4831 - DNA, 60 bp, Artificial Sequence
  Description of Artificial Sequence: targeting sequence/synthetic sequence
ctggacaacaccatctacacccagaacgagggcttcaacatcgccagcaagaacctgaag

SEQ ID NO: 4832 - DNA, 60 bp, Artificial Sequence
  Description of Artificial Sequence: targeting sequence/synthetic sequence
gagaatgtgatacgggacgccgtaacctacacggagcacgccaagcgtaagacagtcact

SEQ ID NO: 4833 - DNA, 60 bp, Artificial Sequence
  Description of Artificial Sequence: targeting sequence/synthetic sequence
ttcgtgcagaacgccctgaacggcaacggcgacagcaacaatatggaccgggccgtgaag

SEQ ID NO: 4834 - DNA, 60 bp, Artificial Sequence
  Description of Artificial Sequence: targeting sequence/synthetic sequence
ggggcaggcctggtgcaaatcaacaaaagtaatgggaaggagacagtggtagggagactc

SEQ ID NO: 4835 - DNA, 60 bp, Artificial Sequence
  Description of Artificial Sequence: targeting sequence/synthetic sequence
ctatcggtgggggtgcagctccaggatgtgccccgaggacaggtagtgaaaggatcagtg

SEQ ID NO: 4836 - DNA, 60 bp, Artificial Sequence
  Description of Artificial Sequence: targeting sequence/synthetic sequence
cgggggctggagagtcagaccaagctggtgaatggacagagccacatttccctctcaaag

SEQ ID NO: 4837 - DNA, 60 bp, Artificial Sequence
  Description of Artificial Sequence: targeting sequence/synthetic sequence
cagagcatcgacagcggcatcagctccctgagctacaaccggaacgaggtgctggccagc

SEQ ID NO: 4838 - DNA, 60 bp, Artificial Sequence
  Description of Artificial Sequence: targeting sequence/synthetic sequence
agtcagaccaagctggtgaatggacagagccacatttccctctcaaaggcagagttccag

SEQ ID NO: 4839 - DNA, 60 bp, Artificial Sequence
  Description of Artificial Sequence: targeting sequence/synthetic sequence
ggggtgggggcctcggggtccttccggctagccaagagcgacgaacccaagaagtcagtg

SEQ ID NO: 4840 - DNA, 60 bp, Artificial Sequence
  Description of Artificial Sequence: targeting sequence/synthetic sequence
gctgcccggccctactcggcgacggcggctgcggctactggaggcatggctaatgtaaaa

SEQ ID NO: 4841 - DNA, 60 bp, Artificial Sequence
  Description of Artificial Sequence: targeting sequence/synthetic sequence
ccctacgcggaccagctgcgcacccaggtcaacacgcaggccgagcagctgcggcgccag

SEQ ID NO: 4842 - DNA, 60 bp, Artificial Sequence
  Description of Artificial Sequence: targeting sequence/synthetic sequence
ctctgtagctgtaaaccgggcgtagctggcccgaaatgtggccagtgccccgacggcaga

SEQ ID NO: 4843 - DNA, 60 bp, Artificial Sequence
  Description of Artificial Sequence: targeting sequence/synthetic sequence
taccccgagtccaagaccccgctaaccgccaccctctcaaaatccggaaacacattccgg

SEQ ID NO: 4844 - DNA, 60 bp, Artificial Sequence
  Description of Artificial Sequence: targeting sequence/synthetic sequence
gccggcaccggcatcgccggcggagtgaccggcagcctgagcctggccagctccaagagc

SEQ ID NO: 4845 - DNA, 60 bp, Artificial Sequence
  Description of Artificial Sequence: targeting sequence/synthetic sequence
gccagacccagcaacttcctctcagcatcttctccactccctgcatcagcaaagggccaa

SEQ ID NO: 4846 - DNA, 60 bp, Artificial Sequence
  Description of Artificial Sequence: targeting sequence/synthetic sequence
gtcagcctcttgcagctgggccaggagactgacaagcttaaaaccagaaatcgagaatcc

SEQ ID NO: 4847 - DNA, 60 bp, Artificial Sequence
  Description of Artificial Sequence: targeting sequence/synthetic sequence
tcgggtagccggaatggggaggagaacatcatcgataacccttatctgcggccggtgaag

SEQ ID NO: 4848 - DNA, 60 bp, Artificial Sequence
  Description of Artificial Sequence: targeting sequence/synthetic sequence
caggacatcgccaaccggctgaacatcgtgagctccgcccagggcagcggcatcgacatc

SEQ ID NO: 4849 - DNA, 60 bp, Artificial Sequence
  Description of Artificial Sequence: targeting sequence/synthetic sequence
gaatccagcaattacatcaacgcagcactgatggatagccacaagcagcctgccgccttc

SEQ ID NO: 4850 - DNA, 60 bp, Artificial Sequence
  Description of Artificial Sequence: targeting sequence/synthetic sequence
cccgccagacccagcaacttcctctcagcatcttctccactccctgcatcagcaaagggc

SEQ ID NO: 4851 - DNA, 60 bp, Artificial Sequence
  Description of Artificial Sequence: targeting sequence/synthetic sequence
ttccaggacatcgccaaccggctgaacatcgtgagctccgcccagggcagcggcatcgac

SEQ ID NO: 4852 - DNA, 60 bp, Artificial Sequence
  Description of Artificial Sequence: targeting sequence/synthetic sequence
cctcccaggaagaaaagtcccaacgagctggtggatgatctctttaaaggtgccaaagag

SEQ ID NO: 4853 - DNA, 60 bp, Artificial Sequence
  Description of Artificial Sequence: targeting sequence/synthetic sequence
tccagagacaactccaagaacacgttgtctctgcaaatgaacagcctgagagttgaggac

SEQ ID NO: 4854 - DNA, 60 bp, Artificial Sequence
  Description of Artificial Sequence: targeting sequence/synthetic sequence
tggctcaaacaacctgaatccaacttaggcattgaaataaaagctttagatgagaatggt

SEQ ID NO: 4855 - DNA, 60 bp, Artificial Sequence
  Description of Artificial Sequence: targeting sequence/synthetic sequence
ggcaccgccgtgagcaaggtgctgcacctggagggcgaggtgaacaagatcaagagcgcc

SEQ ID NO: 4856 - DNA, 60 bp, Artificial Sequence
  Description of Artificial Sequence: targeting sequence/synthetic sequence
gccggcagcgccatgggcgccgctagcctgaccgtgagcgcccagagccggaccctgctc

SEQ ID NO: 4857 - DNA, 60 bp, Artificial Sequence
  Description of Artificial Sequence: targeting sequence/synthetic sequence
atctacagctttccggcgcccaacgtgattctgacgaagccagaggtctcagaagggacc

SEQ ID NO: 4858 - DNA, 60 bp, Artificial Sequence
  Description of Artificial Sequence: targeting sequence/synthetic sequence
gctgagctccggaaccagctggacgtggccaaggtctcccagcagctgggcctggatgcc

SEQ ID NO: 4859 - DNA, 60 bp, Artificial Sequence
  Description of Artificial Sequence: targeting sequence/synthetic sequence
aacaagctgctgggcaaagtcaccatcgcccagggcggcgttttgcctaacatccaggcc

SEQ ID NO: 4860 - DNA, 60 bp, Artificial Sequence
  Description of Artificial Sequence: targeting sequence/synthetic sequence
gtggcccacaacgccatcttacgggccagcctgcctaaggacaggagccccgaggagtat

SEQ ID NO: 4861 - DNA, 60 bp, Artificial Sequence
  Description of Artificial Sequence: targeting sequence/synthetic sequence
gagcccgccagacccagcaacttcctctcagcatcttctccactccctgcatcagcaaag

SEQ ID NO: 4862 - DNA, 60 bp, Artificial Sequence
  Description of Artificial Sequence: targeting sequence/synthetic sequence
aagcagaccaaaggggtgggggcctcggggtccttccggctagccaagagcgacgaaccc

SEQ ID NO: 4863 - DNA, 60 bp, Artificial Sequence
  Description of Artificial Sequence: targeting sequence/synthetic sequence
aagccctgtgccccggggacgttctccaacacgacttcatccacggatatttgcaggccc

SEQ ID NO: 4864 - DNA, 60 bp, Artificial Sequence
  Description of Artificial Sequence: targeting sequence/synthetic sequence
tccagatcagcagttcaggagagcacaggaggcaaaacacagattgctgggcttattggt

SEQ ID NO: 4865 - DNA, 60 bp, Artificial Sequence
  Description of Artificial Sequence: targeting sequence/synthetic sequence
ctcaatgtggcccacaacgccatcttacgggccagcctgcctaaggacaggagccccgag

SEQ ID NO: 4866 - DNA, 60 bp, Artificial Sequence
  Description of Artificial Sequence: targeting sequence/synthetic sequence
aagctgctgggcggcgtgacgatcgcccagggaggcgtcctgcccaacatccaggccgtg

SEQ ID NO: 4867 - DNA, 60 bp, Artificial Sequence
  Description of Artificial Sequence: targeting sequence/synthetic sequence
atgtttttaccagcaacaaaaaatttattgaatgagaagaaccatggtgtcctccacaca

SEQ ID NO: 4868 - DNA, 60 bp, Artificial Sequence
  Description of Artificial Sequence: targeting sequence/synthetic sequence
tccgacctcacaggccgacaagatacctctcgcatgtccacctcacagattcctggtcgg

SEQ ID NO: 4869 - DNA, 60 bp, Artificial Sequence
  Description of Artificial Sequence: targeting sequence/synthetic sequence
aggtcccaggtcattcttggggctcactcaataaccagggaagagccaacaaaacagata

SEQ ID NO: 4870 - DNA, 60 bp, Artificial Sequence
  Description of Artificial Sequence: targeting sequence/synthetic sequence
gcggaccagctgcgcacccaggtcaacacgcaggccgagcagctgcggcgccagctgacc

SEQ ID NO: 4871 - DNA, 60 bp, Artificial Sequence
  Description of Artificial Sequence: targeting sequence/synthetic sequence
cggatgtccagcagctaccccaccgggctcgctgacgtgaaggccgggcctgcccagacc

SEQ ID NO: 4872 - DNA, 60 bp, Artificial Sequence
  Description of Artificial Sequence: targeting sequence/synthetic sequence
cggaacggcagcatgaaggccgctgacaacttcctggaccccaacaaggccagctccctg

SEQ ID NO: 4873 - DNA, 60 bp, Artificial Sequence
  Description of Artificial Sequence: targeting sequence/synthetic sequence
accagcgtgttcctgaaggacaacagcgtggccgctgtgcacaacaagaccgactacatc

SEQ ID NO: 4874 - DNA, 60 bp, Artificial Sequence
  Description of Artificial Sequence: targeting sequence/synthetic sequence
agcctcttgcagctgggccaggagactgacaagcttaaaaccagaaatcgagaatccatt

SEQ ID NO: 4875 - DNA, 60 bp, Artificial Sequence
  Description of Artificial Sequence: targeting sequence/synthetic sequence
ggcacggtgaagcccaatgcaaacagaattgctttagatttccaaagagggaatgatgtt

SEQ ID NO: 4876 - DNA, 60 bp, Artificial Sequence
  Description of Artificial Sequence: targeting sequence/synthetic sequence
gtgaccaagctgaagcagctggagatgctggagaaccagatcgccaccatccaccagagc

SEQ ID NO: 4877 - DNA, 60 bp, Artificial Sequence
  Description of Artificial Sequence: targeting sequence/synthetic sequence
ccccggcagacgggtgccttgatggcctcctctcctcaagacatcaaatttcaagatttg

SEQ ID NO: 4878 - DNA, 60 bp, Artificial Sequence
  Description of Artificial Sequence: targeting sequence/synthetic sequence
aacaagctgcttggtaaagtgaccatcgcccagggtggtgtcctgcccaatatccaggcc

SEQ ID NO: 4879 - DNA, 60 bp, Artificial Sequence
  Description of Artificial Sequence: targeting sequence/synthetic sequence
aagagagtggcagacataaaggagagcaaggaacatgtaattgcaaacagtggccagttt

SEQ ID NO: 4880 - DNA, 60 bp, Artificial Sequence
  Description of Artificial Sequence: targeting sequence/synthetic sequence
gtcaatccacatgtgtcatccttccaaggctcaaagagagggctgaactccagttttgaa

SEQ ID NO: 4881 - DNA, 60 bp, Artificial Sequence
  Description of Artificial Sequence: targeting sequence/synthetic sequence
gccactgaaagcagaatacctgtttcaaagagtcagccggtaactcctgaaaaacatcga

SEQ ID NO: 4882 - DNA, 60 bp, Artificial Sequence
  Description of Artificial Sequence: targeting sequence/synthetic sequence
gccgtgcgcctgctgcttccgggggagctggccaagcacgcggtgtcggagggcaccaag

SEQ ID NO: 4883 - DNA, 60 bp, Artificial Sequence
  Description of Artificial Sequence: targeting sequence/synthetic sequence
ctgaatgtcatcaacaatgccattctccgggccaacctgcaaaagggagagaaccctagc

SEQ ID NO: 4884 - DNA, 60 bp, Artificial Sequence
  Description of Artificial Sequence: targeting sequence/synthetic sequence
tacaaggtgaacgtgtacgccgtgaccaaggagaacaccatcattaaccccagcgagaac

SEQ ID NO: 4885 - DNA, 60 bp, Artificial Sequence
  Description of Artificial Sequence: targeting sequence/synthetic sequence
caggccatcatgaccagcctgcaggacctgaagatcgtgcccatcgaccccaccaagaac

SEQ ID NO: 4886 - DNA, 60 bp, Artificial Sequence
  Description of Artificial Sequence: targeting sequence/synthetic sequence
accagagctaatcccatgtacaatgccgtgtccaacgcagacctgatggatttcaagaat

SEQ ID NO: 4887 - DNA, 60 bp, Artificial Sequence
  Description of Artificial Sequence: targeting sequence/synthetic sequence
ctccagctgaccaccggcaatggcttgttcctcagcgagggcctgaagctagtggataag

SEQ ID NO: 4888 - DNA, 60 bp, Artificial Sequence
  Description of Artificial Sequence: targeting sequence/synthetic sequence
ctctccagatcagcagttcaggagagcacaggaggcaaaacacagattgctgggcttatt

SEQ ID NO: 4889 - DNA, 60 bp, Artificial Sequence
  Description of Artificial Sequence: targeting sequence/synthetic sequence
gtgagcctgagcgacaacgacaccttcgccgctagcgagcacggcaagcggcagaactac

SEQ ID NO: 4890 - DNA, 60 bp, Artificial Sequence
  Description of Artificial Sequence: targeting sequence/synthetic sequence
accggcatcgccggcggagtgaccggcagcctgagcctggccagctccaagagcctgctc

SEQ ID NO: 4891 - DNA, 60 bp, Artificial Sequence
  Description of Artificial Sequence: targeting sequence/synthetic sequence
aagagcatcagctacacccagcaaaactacgtgagcgaggtggagcagcaaaacagcaag

SEQ ID NO: 4892 - DNA, 60 bp, Artificial Sequence
  Description of Artificial Sequence: targeting sequence/synthetic sequence
atcagcaaggacctgaccaacagccacaacgagtacaccatcattaacagcatcgagcag

SEQ ID NO: 4893 - DNA, 60 bp, Artificial Sequence
  Description of Artificial Sequence: targeting sequence/synthetic sequence
cagaccatcccccagatcagcaaccggaccctgaacaccctggtgcaggacaacagctac

SEQ ID NO: 4894 - DNA, 60 bp, Artificial Sequence
  Description of Artificial Sequence: targeting sequence/synthetic sequence
gagaccatcgacaccgtgatcagcaacgccctgcagctgagccagcccaagccccagaag

SEQ ID NO: 4895 - DNA, 60 bp, Artificial Sequence
  Description of Artificial Sequence: targeting sequence/synthetic sequence
gtgcgcctgctgctgcccggggagctggccaagcacgccgtgtccgagggcacaaaggcc

SEQ ID NO: 4896 - DNA, 60 bp, Artificial Sequence
  Description of Artificial Sequence: targeting sequence/synthetic sequence
ggcggatacctgctcggcagccggaaggtgagcggcggaggcgtgaccaaggagagcgcc

SEQ ID NO: 4897 - DNA, 60 bp, Artificial Sequence
  Description of Artificial Sequence: targeting sequence/synthetic sequence
aacaagctgcttggtaaagttaccatcgctcagggcggtgttctgcctaacatccaggcc

SEQ ID NO: 4898 - DNA, 60 bp, Artificial Sequence
  Description of Artificial Sequence: targeting sequence/synthetic sequence
tttcgggggctggagagtcagaccaagctggtgaatggacagagccacatttccctctca

SEQ ID NO: 4899 - DNA, 60 bp, Artificial Sequence
  Description of Artificial Sequence: targeting sequence/synthetic sequence
atcgtggagaagaccaagcagaccgtggccagcatcagctccggccccaagcacacccag

SEQ ID NO: 4900 - DNA, 60 bp, Artificial Sequence
  Description of Artificial Sequence: targeting sequence/synthetic sequence
tccagaagccactcctcgggcagcgtgctgccccttggggagctggagggcaggaggagc

SEQ ID NO: 4901 - DNA, 60 bp, Artificial Sequence
  Description of Artificial Sequence: targeting sequence/synthetic sequence
atggccggcagcgccatgggcgccaccagcctgaccctgagcgcccagagccggaccctg

SEQ ID NO: 4902 - DNA, 60 bp, Artificial Sequence
  Description of Artificial Sequence: targeting sequence/synthetic sequence
gcaacaaaaaatttattgaatgagaagaaccatggtgtcctccacacatctgtagtcctc

SEQ ID NO: 4903 - DNA, 60 bp, Artificial Sequence
  Description of Artificial Sequence: targeting sequence/synthetic sequence
ggcttggcctacccaggtgtgcggacccatgggactctggagagcgtgaatgggcccaag

SEQ ID NO: 4904 - DNA, 60 bp, Artificial Sequence
  Description of Artificial Sequence: targeting sequence/synthetic sequence
aaaaaactagtgctgtccagtgagaagactgtgctgacccctgccaccaaccacatgggc

SEQ ID NO: 4905 - DNA, 60 bp, Artificial Sequence
  Description of Artificial Sequence: targeting sequence/synthetic sequence
caaggaatccagttgaatacaattcttcctgacgccagagaccctgcctttaaagctgcc

SEQ ID NO: 4906 - DNA, 60 bp, Artificial Sequence
  Description of Artificial Sequence: targeting sequence/synthetic sequence
ttgttgggtttcgaggccaacggggccaacgggtctaaagcagttgcaagaacagcaagg

SEQ ID NO: 4907 - DNA, 60 bp, Artificial Sequence
  Description of Artificial Sequence: targeting sequence/synthetic sequence
tgtagctgtaaaccgggcgtagctggcccgaaatgtggccagtgccccgacggcagagca

SEQ ID NO: 4908 - DNA, 60 bp, Artificial Sequence
  Description of Artificial Sequence: targeting sequence/synthetic sequence
accgccgtggtcctgggcggagacgccgctgagcacaacaaggtggtcaccaaggacttc

SEQ ID NO: 4909 - DNA, 60 bp, Artificial Sequence
  Description of Artificial Sequence: targeting sequence/synthetic sequence
tacgcggaccagctgcgcacccaggtcaacacgcaggccgagcagctgcggcgccagctg

SEQ ID NO: 4910 - DNA, 60 bp, Artificial Sequence
  Description of Artificial Sequence: targeting sequence/synthetic sequence
gctaaaggtgccaatggtgctcctggtattgctggtgctcctggcttccctggtgcccga

SEQ ID NO: 4911 - DNA, 60 bp, Artificial Sequence
  Description of Artificial Sequence: targeting sequence/synthetic sequence
agaccccggcagacgggtgccttgatggcctcctctcctcaagacatcaaatttcaagat

SEQ ID NO: 4912 - DNA, 60 bp, Artificial Sequence
  Description of Artificial Sequence: targeting sequence/synthetic sequence
tctgtcagcctcttgcagctgggccaggagactgacaagcttaaaaccagaaatcgagaa

SEQ ID NO: 4913 - DNA, 60 bp, Artificial Sequence
  Description of Artificial Sequence: targeting sequence/synthetic sequence
agcagggataacacactgcaagtggacatcaacgggttcactaccggccgccgaggtgac

SEQ ID NO: 4914 - DNA, 60 bp, Artificial Sequence
  Description of Artificial Sequence: targeting sequence/synthetic sequence
cagacagagcccgccagacccagcaacttcctctcagcatcttctccactccctgcatca

SEQ ID NO: 4915 - DNA, 60 bp, Artificial Sequence
  Description of Artificial Sequence: targeting sequence/synthetic sequence
actgaaagcagaatacctgtttcaaagagtcagccggtaactcctgaaaaacatcgagct

SEQ ID NO: 4916 - DNA, 60 bp, Artificial Sequence
  Description of Artificial Sequence: targeting sequence/synthetic sequence
gcaggcctggtgcaaatcaacaaaagtaatgggaaggagacagtggtagggagactcaac

SEQ ID NO: 4917 - DNA, 60 bp, Artificial Sequence
  Description of Artificial Sequence: targeting sequence/synthetic sequence
caaaattggctcaaacaacctgaatccaacttaggcattgaaataaaagctttagatgag

SEQ ID NO: 4918 - DNA, 60 bp, Artificial Sequence
  Description of Artificial Sequence: targeting sequence/synthetic sequence
aagaccccgctaaccgccaccctctcaaaatccggaaacacattccggcccgaggtccac

SEQ ID NO: 4919 - DNA, 60 bp, Artificial Sequence
  Description of Artificial Sequence: targeting sequence/synthetic sequence
tatggcaagagagtggcagacataaaggagagcaaggaacatgtaattgcaaacagtggc

SEQ ID NO: 4920 - DNA, 60 bp, Artificial Sequence
  Description of Artificial Sequence: targeting sequence/synthetic sequence
gataacacactgcaagtggacatcaacgggttcactaccggccgccgaggtgacctggcc

SEQ ID NO: 4921 - DNA, 60 bp, Artificial Sequence
  Description of Artificial Sequence: targeting sequence/synthetic sequence
tttttaccagcaacaaaaaatttattgaatgagaagaaccatggtgtcctccacacatct

SEQ ID NO: 4922 - DNA, 60 bp, Artificial Sequence
  Description of Artificial Sequence: targeting sequence/synthetic sequence
agcgccatgggcggagccagcctgaccctgagcgcccagagccggaccctgctcgccggc

SEQ ID NO: 4923 - DNA, 60 bp, Artificial Sequence
  Description of Artificial Sequence: targeting sequence/synthetic sequence
atgcagaagggcttcgtgagcatcaacgacaacaagcactacttcgacgatagcggcgtg

SEQ ID NO: 4924 - DNA, 60 bp, Artificial Sequence
  Description of Artificial Sequence: targeting sequence/synthetic sequence
gtgcgcctgctgctgccaggggagctggccaagcacgcggtgtcggagggcaccaaggcc

SEQ ID NO: 4925 - DNA, 60 bp, Artificial Sequence
  Description of Artificial Sequence: targeting sequence/synthetic sequence
ctgctcggcagccggaaggtgagcggcggaggcgtgaccaaggagagcgccgagaagggc

SEQ ID NO: 4926 - DNA, 60 bp, Artificial Sequence
  Description of Artificial Sequence: targeting sequence/synthetic sequence
attaaacaggcctttcaaggagctgtgcaaaaggaattacaacatatcgttggatcacag

SEQ ID NO: 4927 - DNA, 60 bp, Artificial Sequence
  Description of Artificial Sequence: targeting sequence/synthetic sequence
tgcctgcgcaacgagagcacgggctccctgggcacgcagggccgcctctgcaacaagacc

SEQ ID NO: 4928 - DNA, 60 bp, Artificial Sequence
  Description of Artificial Sequence: targeting sequence/synthetic sequence
agcaacgccctgcagctgagccagcccaagccccagaagcagctgaccgcccagagcacc

SEQ ID NO: 4929 - DNA, 60 bp, Artificial Sequence
  Description of Artificial Sequence: targeting sequence/synthetic sequence
ttgatgaagaaagattacagtacttcaaagtttaatcccagtcaggaaaaagatggaaaa

SEQ ID NO: 4930 - DNA, 60 bp, Artificial Sequence
  Description of Artificial Sequence: targeting sequence/synthetic sequence
gccggcagcgccatgggcgccaccagcctgaccctgagcgcccagagccggaccctgctc

SEQ ID NO: 4931 - DNA, 60 bp, Artificial Sequence
  Description of Artificial Sequence: targeting sequence/synthetic sequence
atcaccaacgaccggctgggcgacagcaagctgtacatcaacggcaacctgatcgacaag

SEQ ID NO: 4932 - DNA, 60 bp, Artificial Sequence
  Description of Artificial Sequence: targeting sequence/synthetic sequence
acaaaaggtgccgggaacatggtcaacggattggccaacaatgctgaaattgatgacagc

SEQ ID NO: 4933 - DNA, 60 bp, Artificial Sequence
  Description of Artificial Sequence: targeting sequence/synthetic sequence
aacgtgcggaagcagctgaacaatgccaacgtgtaccgggagggcgtggccacccagacc

SEQ ID NO: 4934 - DNA, 60 bp, Artificial Sequence
  Description of Artificial Sequence: targeting sequence/synthetic sequence
caggacaccttccccaaccaggtgaccctgaccaacatccggaacgagcccgtgatcgtg

SEQ ID NO: 4935 - DNA, 60 bp, Artificial Sequence
  Description of Artificial Sequence: targeting sequence/synthetic sequence
ttggcctacccaggtgtgcggacccatgggactctggagagcgtgaatgggcccaaggca

SEQ ID NO: 4936 - DNA, 60 bp, Artificial Sequence
  Description of Artificial Sequence: targeting sequence/synthetic sequence
ctcaagaaggccctgctcatccagggctccaatgacgtggagatccgggcagagggcaat

SEQ ID NO: 4937 - DNA, 60 bp, Artificial Sequence
  Description of Artificial Sequence: targeting sequence/synthetic sequence
aagcagaaagcagcacagcaggcagcctcttccagtgggcagggtcagcaggcccaaacc

SEQ ID NO: 4938 - DNA, 60 bp, Artificial Sequence
  Description of Artificial Sequence: targeting sequence/synthetic sequence
cacaccacaaacgacacctacatggtggccggcacccccggcacctaccggaccggcacc

SEQ ID NO: 4939 - DNA, 60 bp, Artificial Sequence
  Description of Artificial Sequence: targeting sequence/synthetic sequence
cgcggcagcgctggtccccctggtgctactggtttccctggtgctgctggccgagtcggt

SEQ ID NO: 4940 - DNA, 60 bp, Artificial Sequence
  Description of Artificial Sequence: targeting sequence/synthetic sequence
gttcagttgcttgttcgtgcacatcaggatacccagcgccgtacgtccatgggtgggaca

SEQ ID NO: 4941 - DNA, 60 bp, Artificial Sequence
  Description of Artificial Sequence: targeting sequence/synthetic sequence
gtgattcgtgatgctgtgacttacacggagcacgccaaacgcaagacagtgacagcgatg

SEQ ID NO: 4942 - DNA, 60 bp, Artificial Sequence
  Description of Artificial Sequence: targeting sequence/synthetic sequence
gccaacaccgacgccaacaatatcgagggccaggccatcctgtaccagaacaagttcctg

SEQ ID NO: 4943 - DNA, 60 bp, Artificial Sequence
  Description of Artificial Sequence: targeting sequence/synthetic sequence
gtgaagcccaatgcaaacagaattgctttagatttccaaagagggaatgatgttgccttc

SEQ ID NO: 4944 - DNA, 60 bp, Artificial Sequence
  Description of Artificial Sequence: targeting sequence/synthetic sequence
gctgccctctcgctcagtaccctggccagtcccaaggggggcagtggcacagcgggcacc

SEQ ID NO: 4945 - DNA, 60 bp, Artificial Sequence
  Description of Artificial Sequence: targeting sequence/synthetic sequence
aagctgctgggcaaagtcaccatcgcccagggcggcgtcttgcctaacatccaggccgta

SEQ ID NO: 4946 - DNA, 60 bp, Artificial Sequence
  Description of Artificial Sequence: targeting sequence/synthetic sequence
accatctacagctttccggcgcccaacgtgattctgacgaagccagaggtctcagaaggg

SEQ ID NO: 4947 - DNA, 60 bp, Artificial Sequence
  Description of Artificial Sequence: targeting sequence/synthetic sequence
agcgtgcaggacaccttccccaaccaggtgaccctgaccaacatccggaacgagcccgtg

SEQ ID NO: 4948 - DNA, 60 bp, Artificial Sequence
  Description of Artificial Sequence: targeting sequence/synthetic sequence
gaccagagcaagtacctgatgatgtacaacgacaacaagatggtggacagcaaggacgtg

SEQ ID NO: 4949 - DNA, 60 bp, Artificial Sequence
  Description of Artificial Sequence: targeting sequence/synthetic sequence
aagcttttgggcggcgtgaccattgcccagggcggagtcctgcctaacattcaggcagtg

SEQ ID NO: 4950 - DNA, 60 bp, Artificial Sequence
  Description of Artificial Sequence: targeting sequence/synthetic sequence
aaaggtgccaatggtgctcctggtattgctggtgctcctggcttccctggtgcccgaggc

SEQ ID NO: 4951 - DNA, 60 bp, Artificial Sequence
  Description of Artificial Sequence: targeting sequence/synthetic sequence
aaaaggtcccaggtcattcttggggctcactcaataaccagggaagagccaacaaaacag

SEQ ID NO: 4952 - DNA, 60 bp, Artificial Sequence
  Description of Artificial Sequence: targeting sequence/synthetic sequence
aacaagctgctgggcaaagtcaccatcgcgcagggtggtgtcttgcccaatatccaggcc

SEQ ID NO: 4953 - DNA, 60 bp, Artificial Sequence
  Description of Artificial Sequence: targeting sequence/synthetic sequence
aactacaaggtgaacgtgtacgccgtgaccaaggagaacaccatcattaaccccagcgag

SEQ ID NO: 4954 - DNA, 60 bp, Artificial Sequence
  Description of Artificial Sequence: targeting sequence/synthetic sequence
cagcaaagcgtgcaggacaccttccccaacaatgtgatcctgagctccatcaaccggcag

SEQ ID NO: 4955 - DNA, 60 bp, Artificial Sequence
  Description of Artificial Sequence: targeting sequence/synthetic sequence
actcacaagggcattcccatggcagccagcaatttgtccgtcaactacccagtgggggcc

SEQ ID NO: 4956 - DNA, 60 bp, Artificial Sequence
  Description of Artificial Sequence: targeting sequence/synthetic sequence
gccaaaggtgctcgcggcagcgctggtccccctggtgctactggtttccctggtgctgct

SEQ ID NO: 4957 - DNA, 60 bp, Artificial Sequence
  Description of Artificial Sequence: targeting sequence/synthetic sequence
gattatggtaactttttggctaatcacacaaatcctcttactgtttccaaaattgacact

SEQ ID NO: 4958 - DNA, 60 bp, Artificial Sequence
  Description of Artificial Sequence: targeting sequence/synthetic sequence
gtgaagaatggaactagggggaaaatcacagatctgatcaaggaccttgactcgcagaca

SEQ ID NO: 4959 - DNA, 60 bp, Artificial Sequence
  Description of Artificial Sequence: targeting sequence/synthetic sequence
tacacccagcaaaactacgtgagcgaggtggagcagcaaaacagcaagagcgtgctgtgg

SEQ ID NO: 4960 - DNA, 60 bp, Artificial Sequence
  Description of Artificial Sequence: targeting sequence/synthetic sequence
aagttactcgggggtgtcaccattgcccagggcggcgtcttgcccaatatccaggctgtc

SEQ ID NO: 4961 - DNA, 60 bp, Artificial Sequence
  Description of Artificial Sequence: targeting sequence/synthetic sequence
gcccccgccaacaccgacgccaacaatatcgagggccaggccatcctgtaccagaacaag

SEQ ID NO: 4962 - DNA, 60 bp, Artificial Sequence
  Description of Artificial Sequence: targeting sequence/synthetic sequence
agcaccacctacaacccctccctcaagagtcgagtcaccctttcactagacacgtccaag

SEQ ID NO: 4963 - DNA, 60 bp, Artificial Sequence
  Description of Artificial Sequence: targeting sequence/synthetic sequence
gtcggccctgttggcgcccgtggccccgccggaccccaaggcccacgtggtgacaagggt

SEQ ID NO: 4964 - DNA, 60 bp, Artificial Sequence
  Description of Artificial Sequence: targeting sequence/synthetic sequence
aagagccttctggcccccggatctggcagcggcggcgcgtccccactgaccagcgcgcag

SEQ ID NO: 4965 - DNA, 60 bp, Artificial Sequence
  Description of Artificial Sequence: targeting sequence/synthetic sequence
tccaaaccagccttctcctataccagcagctccacccccaccatgactgacaacagaaag

SEQ ID NO: 4966 - DNA, 60 bp, Artificial Sequence
  Description of Artificial Sequence: targeting sequence/synthetic sequence
atccgcaagctgaccgacatggaggctcagctcctgaaccagacatcaagaatggatgcc

SEQ ID NO: 4967 - DNA, 60 bp, Artificial Sequence
  Description of Artificial Sequence: targeting sequence/synthetic sequence
agcgccatgggcgccgctagcctgaccgtgagcgcccagagccggaccctgctcgccggc

SEQ ID NO: 4968 - DNA, 60 bp, Artificial Sequence
  Description of Artificial Sequence: targeting sequence/synthetic sequence
ggtggcttggcctacccaggtgtgcggacccatgggactctggagagcgtgaatgggccc

SEQ ID NO: 4969 - DNA, 60 bp, Artificial Sequence
  Description of Artificial Sequence: targeting sequence/synthetic sequence
atccagaccatcatgaacgccatccccgacctgaagatcgtgcccatcgaccccaccaag

SEQ ID NO: 4970 - DNA, 60 bp, Artificial Sequence
  Description of Artificial Sequence: targeting sequence/synthetic sequence
aagcccaatgcaaacagaattgctttagatttccaaagagggaatgatgttgccttccac

SEQ ID NO: 4971 - DNA, 60 bp, Artificial Sequence
  Description of Artificial Sequence: targeting sequence/synthetic sequence
ggaactgctagcagtactggaaacttggtagtgaaagatccaacaagggtaatggtaccc

SEQ ID NO: 4972 - DNA, 60 bp, Artificial Sequence
  Description of Artificial Sequence: targeting sequence/synthetic sequence
ttcgcccccgccaacacctacaacaataacatcgagggccaggccatcgtgtaccagagc

SEQ ID NO: 4973 - DNA, 60 bp, Artificial Sequence
  Description of Artificial Sequence: targeting sequence/synthetic sequence
accacaaacgacacctacatggtggccggcacccccggcacctaccggaccggcaccagc

SEQ ID NO: 4974 - DNA, 60 bp, Artificial Sequence
  Description of Artificial Sequence: targeting sequence/synthetic sequence
tacgagaaccagatcaccgcattcctgggccacaatggagctgggaaaaccaccaccttg

SEQ ID NO: 4975 - DNA, 60 bp, Artificial Sequence
  Description of Artificial Sequence: targeting sequence/synthetic sequence
gtaggggccgtgctggagcaggggcagctgcagaacacgctgcatgcccagctgcagagc

SEQ ID NO: 4976 - DNA, 60 bp, Artificial Sequence
  Description of Artificial Sequence: targeting sequence/synthetic sequence
aagggcatccagaagcccaagagcggcacccagggcaactacgacgatgactggaagggc

SEQ ID NO: 4977 - DNA, 60 bp, Artificial Sequence
  Description of Artificial Sequence: targeting sequence/synthetic sequence
actgctactgtactggcacgctctatagccaaggaaggcttcgagaagattagcaaaggt

SEQ ID NO: 4978 - DNA, 60 bp, Artificial Sequence
  Description of Artificial Sequence: targeting sequence/synthetic sequence
aacaagctgctgggcaaagtcaccatcgcacagggcggtgtcctgcccaacattcaggcc

SEQ ID NO: 4979 - DNA, 60 bp, Artificial Sequence
  Description of Artificial Sequence: targeting sequence/synthetic sequence
aatgagataaagaagaggttccagactacttacggttcaagagcacagacagcacttcca

SEQ ID NO: 4980 - DNA, 60 bp, Artificial Sequence
  Description of Artificial Sequence: targeting sequence/synthetic sequence
ggcaacctcaagaaggccctgctcatccagggctccaatgacgtggagatccgggcagag

SEQ ID NO: 4981 - DNA, 60 bp, Artificial Sequence
  Description of Artificial Sequence: targeting sequence/synthetic sequence
ttaaagcagaaagcagcacagcaggcagcctcttccagtgggcagggtcagcaggcccaa

SEQ ID NO: 4982 - DNA, 60 bp, Artificial Sequence
  Description of Artificial Sequence: targeting sequence/synthetic sequence
tactcctcaggccatgttcatttatcctcagagaataaattccaaaactctgcaatctta

SEQ ID NO: 4983 - DNA, 60 bp, Artificial Sequence
  Description of Artificial Sequence: targeting sequence/synthetic sequence
aaagtcacaattgctcagggcggtgttctgcccaacatccaggctgtactgctccccaag

SEQ ID NO: 4984 - DNA, 60 bp, Artificial Sequence
  Description of Artificial Sequence: targeting sequence/synthetic sequence
gtgcgcttgctactgccgggagagctggctaaacatgctgtgtctgagggcaccaaggct

SEQ ID NO: 4985 - DNA, 60 bp, Artificial Sequence
  Description of Artificial Sequence: targeting sequence/synthetic sequence
cattttggaactgctagcagtactggaaacttggtagtgaaagatccaacaagggtaatg

SEQ ID NO: 4986 - DNA, 60 bp, Artificial Sequence
  Description of Artificial Sequence: targeting sequence/synthetic sequence
atgaagaaagattacagtacttcaaagtttaatcccagtcaggaaaaagatggaaaaatt

SEQ ID NO: 4987 - DNA, 60 bp, Artificial Sequence
  Description of Artificial Sequence: targeting sequence/synthetic sequence
tgcgtgcgcaatgagagcaccggctcgctgggcacgcagggccgcctgtgcaacaagacg

SEQ ID NO: 4988 - DNA, 60 bp, Artificial Sequence
  Description of Artificial Sequence: targeting sequence/synthetic sequence
acccagcaaaactacgtgagcgaggtggagcagcaaaacagcaagagcgtgctgtggggc

SEQ ID NO: 4989 - DNA, 60 bp, Artificial Sequence
  Description of Artificial Sequence: targeting sequence/synthetic sequence
agcttcaccgccgtggtcctgggcggagacgccgctgagcacaacaaggtggtcaccaag

SEQ ID NO: 4990 - DNA, 60 bp, Artificial Sequence
  Description of Artificial Sequence: targeting sequence/synthetic sequence
aaaggtgctcgcggcagcgctggtccccctggtgctactggtttccctggtgctgctggc

SEQ ID NO: 4991 - DNA, 60 bp, Artificial Sequence
  Description of Artificial Sequence: targeting sequence/synthetic sequence
acctacaacccctccctcaagagtcgagtcaccctttcactagacacgtccaagaaccag

SEQ ID NO: 4992 - DNA, 60 bp, Artificial Sequence
  Description of Artificial Sequence: targeting sequence/synthetic sequence
ggggccgtgctggagcaggggcagctgcagaacacgctgcatgcccagctgcagagcgcg

SEQ ID NO: 4993 - DNA, 60 bp, Artificial Sequence
  Description of Artificial Sequence: targeting sequence/synthetic sequence
gtgggtgacgggatctataacaacaccatgggccacgtgcacagccacttgcagggagag

SEQ ID NO: 4994 - DNA, 60 bp, Artificial Sequence
  Description of Artificial Sequence: targeting sequence/synthetic sequence
agcaaggacctgaccaacagccacaacgagtacaccatcattaacagcatcgagcagaac

SEQ ID NO: 4995 - DNA, 60 bp, Artificial Sequence
  Description of Artificial Sequence: targeting sequence/synthetic sequence
ctgagccagcccaagccccagaagcagctgaccgcccagagcacccccagcaccagcggc

SEQ ID NO: 4996 - DNA, 60 bp, Artificial Sequence
  Description of Artificial Sequence: targeting sequence/synthetic sequence
ggcaaaaaactagtgctgtccagtgagaagactgtgctgacccctgccaccaaccacatg

SEQ ID NO: 4997 - DNA, 60 bp, Artificial Sequence
  Description of Artificial Sequence: targeting sequence/synthetic sequence
ctttccagaagccactcctcgggcagcgtgctgccccttggggagctggagggcaggagg

SEQ ID NO: 4998 - DNA, 60 bp, Artificial Sequence
  Description of Artificial Sequence: targeting sequence/synthetic sequence
gtacaggggctggtcccagccggcggctccagctccaacagcacccgagagccgcccgcc

SEQ ID NO: 4999 - DNA, 60 bp, Artificial Sequence
  Description of Artificial Sequence: targeting sequence/synthetic sequence
attttgagaggcgatttttcctcagccaataaccgtgataatacctacaaccgagtgtca

SEQ ID NO: 5000 - DNA, 60 bp, Artificial Sequence
  Description of Artificial Sequence: targeting sequence/synthetic sequence
ccctgtgccccggggacgttctccaacacgacttcatccacggatatttgcaggccccac

SEQ ID NO: 5001 - DNA, 60 bp, Artificial Sequence
  Description of Artificial Sequence: targeting sequence/synthetic sequence
caccgcttacaactggatgcactgcagcgtggtaagggcctgagccatggggtcccggaa

SEQ ID NO: 5002 - DNA, 60 bp, Artificial Sequence
  Description of Artificial Sequence: targeting sequence/synthetic sequence
ctgggtctcaagagcctggtgagcaagggcaccctggtgcagaccaagggcaccggcgcg

SEQ ID NO: 5003 - DNA, 60 bp, Artificial Sequence
  Description of Artificial Sequence: targeting sequence/synthetic sequence
aaagtgaccatcgcccagggtggtgtcctgcccaatatccaggccgtgctgctgcctaag

SEQ ID NO: 5004 - DNA, 60 bp, Artificial Sequence
  Description of Artificial Sequence: targeting sequence/synthetic sequence
tacaccagcgtgttcctgaaggacaacagcgtggccgctgtgcacaacaagaccgactac

SEQ ID NO: 5005 - DNA, 60 bp, Artificial Sequence
  Description of Artificial Sequence: targeting sequence/synthetic sequence
ctggctgcccggccctactcggcgacggcggctgcggctactggaggcatggctaatgta

SEQ ID NO: 5006 - DNA, 60 bp, Artificial Sequence
  Description of Artificial Sequence: targeting sequence/synthetic sequence
gagaaccggccagatgcccgctcagccatgaaccgccacaacaacgaggctgggcgccag

SEQ ID NO: 5007 - DNA, 60 bp, Artificial Sequence
  Description of Artificial Sequence: targeting sequence/synthetic sequence
cagaagggcatccagaagcccaagagcggcacccagggcaactacgacgatgactggaag

SEQ ID NO: 5008 - DNA, 60 bp, Artificial Sequence
  Description of Artificial Sequence: targeting sequence/synthetic sequence
ccaggcaaaaaactagtgctgtccagtgagaagactgtgctgacccctgccaccaaccac

SEQ ID NO: 5009 - DNA, 60 bp, Artificial Sequence
  Description of Artificial Sequence: targeting sequence/synthetic sequence
cgcaagagccttctggcccccggatctggcagcggcggcgcgtccccactgaccagcgcg

SEQ ID NO: 5010 - DNA, 60 bp, Artificial Sequence
  Description of Artificial Sequence: targeting sequence/synthetic sequence
aagctgctgggcaaagtcaccatcgcgcagggtggtgtcttgcccaatatccaggccgtg

SEQ ID NO: 5011 - DNA, 60 bp, Artificial Sequence
  Description of Artificial Sequence: targeting sequence/synthetic sequence
cctgggagctctgggactggagggactgcaacctggaaacctgggagctctggacctgga

SEQ ID NO: 5012 - DNA, 60 bp, Artificial Sequence
  Description of Artificial Sequence: targeting sequence/synthetic sequence
atacgggggcagccctctcctttaggtgcagcagtgatcaatggctctcagcatccatca

SEQ ID NO: 5013 - DNA, 60 bp, Artificial Sequence
  Description of Artificial Sequence: targeting sequence/synthetic sequence
accaagccccctctgcccagcgtgaagaaactgaccgaggaccggtggaacaagccccag

SEQ ID NO: 5014 - DNA, 60 bp, Artificial Sequence
  Description of Artificial Sequence: targeting sequence/synthetic sequence
aacaaaaggtcccaggtcattcttggggctcactcaataaccagggaagagccaacaaaa

SEQ ID NO: 5015 - DNA, 60 bp, Artificial Sequence
  Description of Artificial Sequence: targeting sequence/synthetic sequence
aagacccggaacggcagcatgaaggccgctgacaacttcctggaccccaacaaggccagc

SEQ ID NO: 5016 - DNA, 60 bp, Artificial Sequence
  Description of Artificial Sequence: targeting sequence/synthetic sequence
aacgaccggctgggcgacagcaagctgtacatcaacggcaacctgatcgaccagaagagc

SEQ ID NO: 5017 - DNA, 60 bp, Artificial Sequence
  Description of Artificial Sequence: targeting sequence/synthetic sequence
cactctgtggacagcgtcctcactgccctgcaggactccagcaaacgaaagcagctggtc

SEQ ID NO: 5018 - DNA, 60 bp, Artificial Sequence
  Description of Artificial Sequence: targeting sequence/synthetic sequence
tacttcaacaccaacaccgccgaggccgctaccggctggcagaccatcgacggcaagaaa

SEQ ID NO: 5019 - DNA, 60 bp, Artificial Sequence
  Description of Artificial Sequence: targeting sequence/synthetic sequence
cgggtaggggccgtgctggagcaggggcagctgcagaacacgctgcatgcccagctgcag

SEQ ID NO: 5020 - DNA, 60 bp, Artificial Sequence
  Description of Artificial Sequence: targeting sequence/synthetic sequence
caggcctttcaaggagctgtgcaaaaggaattacaacatatcgttggatcacagcacatc

SEQ ID NO: 5021 - DNA, 60 bp, Artificial Sequence
  Description of Artificial Sequence: targeting sequence/synthetic sequence
ctaagagcactgaatcgagtactacatgatgaaattcttaataaacctatggaaacactt

SEQ ID NO: 5022 - DNA, 60 bp, Artificial Sequence
  Description of Artificial Sequence: targeting sequence/synthetic sequence
gccagcaccccccctgacaagttcgccgctaacgtggccaacgtgagcatcaacaagaaa

SEQ ID NO: 5023 - DNA, 60 bp, Artificial Sequence
  Description of Artificial Sequence: targeting sequence/synthetic sequence
gtgcgcctgctgcttccgggggagctggccaagcacgccgtgtcggagggcaccaaggcc

SEQ ID NO: 5024 - DNA, 60 bp, Artificial Sequence
  Description of Artificial Sequence: targeting sequence/synthetic sequence
ctgggcacggtgaagcccaatgcaaacagaattgctttagatttccaaagagggaatgat

SEQ ID NO: 5025 - DNA, 60 bp, Artificial Sequence
  Description of Artificial Sequence: targeting sequence/synthetic sequence
cgggggcagccctctcctttaggtgcagcagtgatcaatggctctcagcatccatcatca

SEQ ID NO: 5026 - DNA, 60 bp, Artificial Sequence
  Description of Artificial Sequence: targeting sequence/synthetic sequence
aactttttggctaatcacacaaatcctcttactgtttccaaaattgacactgagatgagg

SEQ ID NO: 5027 - DNA, 60 bp, Artificial Sequence
  Description of Artificial Sequence: targeting sequence/synthetic sequence
ttcggcatctacaacagccggctgagcgaggtgaacatcgcccagaacaatgacatcatt

SEQ ID NO: 5028 - DNA, 60 bp, Artificial Sequence
  Description of Artificial Sequence: targeting sequence/synthetic sequence
actgtactggcacgctctatagccaaggaaggcttcgagaagattagcaaaggtgctaat

SEQ ID NO: 5029 - DNA, 60 bp, Artificial Sequence
  Description of Artificial Sequence: targeting sequence/synthetic sequence
agcaccatgggcgccgctagcgtgaccctgaccgtgcaggcccggcagctgatgagcggc

SEQ ID NO: 5030 - DNA, 60 bp, Artificial Sequence
  Description of Artificial Sequence: targeting sequence/synthetic sequence
gtaatccgcgatgcagttacctacacggagcacgccaaacgcaagacagtcacagccatg

SEQ ID NO: 5031 - DNA, 60 bp, Artificial Sequence
  Description of Artificial Sequence: targeting sequence/synthetic sequence
cccacaggatctttcatgatggtgaacagctctgggagagcctctggccagaaggcccac

SEQ ID NO: 5032 - DNA, 60 bp, Artificial Sequence
  Description of Artificial Sequence: targeting sequence/synthetic sequence
aaaccagccttctcctataccagcagctccacccccaccatgactgacaacagaaagggg

SEQ ID NO: 5033 - DNA, 60 bp, Artificial Sequence
  Description of Artificial Sequence: targeting sequence/synthetic sequence
aacaatcggggccagagcatcaagctgaaccccaagatcattgacagcatccccgacaag

SEQ ID NO: 5034 - DNA, 60 bp, Artificial Sequence
  Description of Artificial Sequence: targeting sequence/synthetic sequence
tatgtgtacaaggtgctgaagcaggtccaccccgacaccggcatctcttccaaggctatg

SEQ ID NO: 5035 - DNA, 60 bp, Artificial Sequence
  Description of Artificial Sequence: targeting sequence/synthetic sequence
ttgcttgttcgtgcacatcaggatacccagcgccgtacgtccatgggtgggacacagcag

SEQ ID NO: 5036 - DNA, 60 bp, Artificial Sequence
  Description of Artificial Sequence: targeting sequence/synthetic sequence
actgccctctccagatcagcagttcaggagagcacaggaggcaaaacacagattgctggg

SEQ ID NO: 5037 - DNA, 60 bp, Artificial Sequence
  Description of Artificial Sequence: targeting sequence/synthetic sequence
gctaagggtgaagttggacctgcagggtctcctggttcaaatggtgcccctggacaaaga

SEQ ID NO: 5038 - DNA, 60 bp, Artificial Sequence
  Description of Artificial Sequence: targeting sequence/synthetic sequence
aaactgcaggagacatctaactggcttctgtcccagcagcaggctgacggctcgttccag

SEQ ID NO: 5039 - DNA, 60 bp, Artificial Sequence
  Description of Artificial Sequence: targeting sequence/synthetic sequence
gacagccagctccagctgaccaccggcaatggcttgttcctcagcgagggcctgaagcta

SEQ ID NO: 5040 - DNA, 60 bp, Artificial Sequence
  Description of Artificial Sequence: targeting sequence/synthetic sequence
cgggacattcaggatgaaaaccagctgctggtggccgacgtgaagcggctgggaaagcag

SEQ ID NO: 5041 - DNA, 60 bp, Artificial Sequence
  Description of Artificial Sequence: targeting sequence/synthetic sequence
aagttgctgggtaaagtcacaattgctcagggcggtgttctgcccaacatccaggctgta

SEQ ID NO: 5042 - DNA, 60 bp, Artificial Sequence
  Description of Artificial Sequence: targeting sequence/synthetic sequence
cagcgggtaggggccgtgctggagcaggggcagctgcagaacacgctgcatgcccagctg

SEQ ID NO: 5043 - DNA, 60 bp, Artificial Sequence
  Description of Artificial Sequence: targeting sequence/synthetic sequence
agagcactgaatcgagtactacatgatgaaattcttaataaacctatggaaacacttaaa

SEQ ID NO: 5044 - DNA, 60 bp, Artificial Sequence
  Description of Artificial Sequence: targeting sequence/synthetic sequence
ccaggactacctggaacaaaagggacaagaggacctccgggagcatctggctaccctgga

SEQ ID NO: 5045 - DNA, 60 bp, Artificial Sequence
  Description of Artificial Sequence: targeting sequence/synthetic sequence
ttgggtttcgaggccaacggggccaacgggtctaaagcagttgcaagaacagcaaggaaa

SEQ ID NO: 5046 - DNA, 60 bp, Artificial Sequence
  Description of Artificial Sequence: targeting sequence/synthetic sequence
ggagacaaaggtgcaaaaggagagaaagggcaggcaggcccacctggcataggcatccca

SEQ ID NO: 5047 - DNA, 60 bp, Artificial Sequence
  Description of Artificial Sequence: targeting sequence/synthetic sequence
tcacagatgctgaaacatgcagttgtaaacttgattaactatcaagatgatgcagaactt

SEQ ID NO: 5048 - DNA, 60 bp, Artificial Sequence
  Description of Artificial Sequence: targeting sequence/synthetic sequence
ctgcggatgtccagcagctaccccaccgggctcgctgacgtgaaggccgggcctgcccag

SEQ ID NO: 5049 - DNA, 60 bp, Artificial Sequence
  Description of Artificial Sequence: targeting sequence/synthetic sequence
aacttccaggacatcgccaaccggctgaacatcgtgagctccgcccagggcagcggcatc

SEQ ID NO: 5050 - DNA, 60 bp, Artificial Sequence
  Description of Artificial Sequence: targeting sequence/synthetic sequence
gtgcaggagagcgtgcaggacaccttccccaaccaggtgaccctgaccaacatccggaac

SEQ ID NO: 5051 - DNA, 60 bp, Artificial Sequence
  Description of Artificial Sequence: targeting sequence/synthetic sequence
caggagacatctaactggcttctgtcccagcagcaggctgacggctcgttccaggacccc

SEQ ID NO: 5052 - DNA, 60 bp, Artificial Sequence
  Description of Artificial Sequence: targeting sequence/synthetic sequence
gcagtgcccacaggatctttcatgatggtgaacagctctgggagagcctctggccagaag

SEQ ID NO: 5053 - DNA, 60 bp, Artificial Sequence
  Description of Artificial Sequence: targeting sequence/synthetic sequence
caaaccaggggtactggtgcttccggttcctttaagcttagtaagaaggtgattcctaaa

SEQ ID NO: 5054 - DNA, 60 bp, Artificial Sequence
  Description of Artificial Sequence: targeting sequence/synthetic sequence
gccactaaccattttggaactgctagcagtactggaaacttggtagtgaaagatccaaca

SEQ ID NO: 5055 - DNA, 60 bp, Artificial Sequence
  Description of Artificial Sequence: targeting sequence/synthetic sequence
aaccggggccagagcatcaagctgaaccccaagatcattgacagcatccccgacaagggc

SEQ ID NO: 5056 - DNA, 60 bp, Artificial Sequence
  Description of Artificial Sequence: targeting sequence/synthetic sequence
accacgctgtcgctcagcacactggccacacccaagcgcagcggcaacaacaacggctca

SEQ ID NO: 5057 - DNA, 60 bp, Artificial Sequence
  Description of Artificial Sequence: targeting sequence/synthetic sequence
gctgtgcgcctgctgctacccggggagctggccaaacacgcggtgtcggagggcaccaag

SEQ ID NO: 5058 - DNA, 60 bp, Artificial Sequence
  Description of Artificial Sequence: targeting sequence/synthetic sequence
aagggcttcgtgagcatcaacgacaacaagcactacttcgacgatagcggcgtgatgaag

SEQ ID NO: 5059 - DNA, 60 bp, Artificial Sequence
  Description of Artificial Sequence: targeting sequence/synthetic sequence
ggtgcaaaaggagagaaagggcaggcaggcccacctggcataggcatcccaggactgcgt

SEQ ID NO: 5060 - DNA, 60 bp, Artificial Sequence
  Description of Artificial Sequence: targeting sequence/synthetic sequence
gggactggagggactgcaacctggaaacctgggagctctggacctggaagtactggaagc

SEQ ID NO: 5061 - DNA, 60 bp, Artificial Sequence
  Description of Artificial Sequence: targeting sequence/synthetic sequence
cacaagggcattcccatggcagccagcaatttgtccgtcaactacccagtgggggcccca

SEQ ID NO: 5062 - DNA, 60 bp, Artificial Sequence
  Description of Artificial Sequence: targeting sequence/synthetic sequence
aggccggacgcgcgctcggccatgaacaagcacaacaacgaggcgggccgcacgactatc

SEQ ID NO: 5063 - DNA, 60 bp, Artificial Sequence
  Description of Artificial Sequence: targeting sequence/synthetic sequence
aagtctgttaatggacaaatagaaagcctcattagtcctgatggttctcgtaaaaacccc

SEQ ID NO: 5064 - DNA, 60 bp, Artificial Sequence
  Description of Artificial Sequence: targeting sequence/synthetic sequence
ggtgacgggatctataacaacaccatgggccacgtgcacagccacttgcagggagaggtg

SEQ ID NO: 5065 - DNA, 60 bp, Artificial Sequence
  Description of Artificial Sequence: targeting sequence/synthetic sequence
accgacgccaacaatatcgagggccaggccatccggtaccagaaccggttcctgcacctg

SEQ ID NO: 5066 - DNA, 60 bp, Artificial Sequence
  Description of Artificial Sequence: targeting sequence/synthetic sequence
aagtacctgatgatgtacaacgacaacaagatggtggacagcaaggacgtgaagatcgag

SEQ ID NO: 5067 - DNA, 60 bp, Artificial Sequence
  Description of Artificial Sequence: targeting sequence/synthetic sequence
gcccagggcggcgtcttgcccaatatccaggctgtcctgttgcccaagaaaacggagagt

SEQ ID NO: 5068 - DNA, 60 bp, Artificial Sequence
  Description of Artificial Sequence: targeting sequence/synthetic sequence
gtgaaggccgtgatcctgggcggagaccccagctccggcgcccgggtggtcaccggcaag

SEQ ID NO: 5069 - DNA, 60 bp, Artificial Sequence
  Description of Artificial Sequence: targeting sequence/synthetic sequence
ctgcgcacccaggtcaacacgcaggccgagcagctgcggcgccagctgaccccctacgca

SEQ ID NO: 5070 - DNA, 60 bp, Artificial Sequence
  Description of Artificial Sequence: targeting sequence/synthetic sequence
aagtacttcgcccccgccaacaccgtgaacgacaacatctacggccaggccgtggagtac

SEQ ID NO: 5071 - DNA, 60 bp, Artificial Sequence
  Description of Artificial Sequence: targeting sequence/synthetic sequence
cggggccagagcatcaagctgaaccccaagatcattgacagcatccccgacaagggcctg

SEQ ID NO: 5072 - DNA, 60 bp, Artificial Sequence
  Description of Artificial Sequence: targeting sequence/synthetic sequence
attggatatatctctcacagtgggagcaccacctacaacccctccctcaagagtcgagtc

SEQ ID NO: 5073 - DNA, 60 bp, Artificial Sequence
  Description of Artificial Sequence: targeting sequence/synthetic sequence
tactacaaactgcgcacagaaggagatggagtatacaccttaaatgataagaagcagtgg

SEQ ID NO: 5074 - DNA, 60 bp, Artificial Sequence
  Description of Artificial Sequence: targeting sequence/synthetic sequence
tactatttcaacaccaacaccgccgaggccgctaccggctggcagaccatcgacggcaag

SEQ ID NO: 5075 - DNA, 60 bp, Artificial Sequence
  Description of Artificial Sequence: targeting sequence/synthetic sequence
gctcgcggcagcgctggtccccctggtgctactggtttccctggtgctgctggccgagtc

SEQ ID NO: 5076 - DNA, 60 bp, Artificial Sequence
  Description of Artificial Sequence: targeting sequence/synthetic sequence
cagttgcttgttcgtgcacatcaggatacccagcgccgtacgtccatgggtgggacacag

SEQ ID NO: 5077 - DNA, 60 bp, Artificial Sequence
  Description of Artificial Sequence: targeting sequence/synthetic sequence
gacgggaggtacggtatggacgtctggggccaagggaccacggtcaccgtctcctcaggg

SEQ ID NO: 5078 - DNA, 60 bp, Artificial Sequence
  Description of Artificial Sequence: targeting sequence/synthetic sequence
ttagtgaacaagggaatcctggtgcaaaccaggggtactggtgcttccggttcctttaag

SEQ ID NO: 5079 - DNA, 60 bp, Artificial Sequence
  Description of Artificial Sequence: targeting sequence/synthetic sequence
gtcaccatcgcgcagggtggtgtcttgcccaatatccaggccgtgctgctgcctaagaag

SEQ ID NO: 5080 - DNA, 60 bp, Artificial Sequence
  Description of Artificial Sequence: targeting sequence/synthetic sequence
acaggatctttcatgatggtgaacagctctgggagagcctctggccagaaggcccacctt

SEQ ID NO: 5081 - DNA, 60 bp, Artificial Sequence
  Description of Artificial Sequence: targeting sequence/synthetic sequence
accatcgcccagggtggtgtcctgcccaatatccaggccgtgctgctgcctaagaaaact

SEQ ID NO: 5082 - DNA, 60 bp, Artificial Sequence
  Description of Artificial Sequence: targeting sequence/synthetic sequence
cacacgaccacgctgtcgctcagcacactggccacacccaagcgcagcggcaacaacaac

SEQ ID NO: 5083 - DNA, 60 bp, Artificial Sequence
  Description of Artificial Sequence: targeting sequence/synthetic sequence
aagaaggccctgaagctgatggggtcaaatgaaggtgaattcaaggctgaaggaaatagc

SEQ ID NO: 5084 - DNA, 60 bp, Artificial Sequence
  Description of Artificial Sequence: targeting sequence/synthetic sequence
gggtcccagacctttgtcaatccacatgtgtcatccttccaaggctcaaagagagggctg

SEQ ID NO: 5085 - DNA, 60 bp, Artificial Sequence
  Description of Artificial Sequence: targeting sequence/synthetic sequence
tccgtgtacgtgtacaaggtgctgaagcaggtccaccccgacaccggcatctcttctaag

SEQ ID NO: 5086 - DNA, 60 bp, Artificial Sequence
  Description of Artificial Sequence: targeting sequence/synthetic sequence
tcccagacctttgtcaatccacatgtgtcatccttccaaggctcaaagagagggctgaac

SEQ ID NO: 5087 - DNA, 60 bp, Artificial Sequence
  Description of Artificial Sequence: targeting sequence/synthetic sequence
aagctgaccgacatggaggctcagctcctgaaccagacatcaagaatggatgcccagatg

SEQ ID NO: 5088 - DNA, 60 bp, Artificial Sequence
  Description of Artificial Sequence: targeting sequence/synthetic sequence
ttaaacaagctgctgggcaaagtgaccatcgctcagggcggcgtcctgcccaacatccag

SEQ ID NO: 5089 - DNA, 60 bp, Artificial Sequence
  Description of Artificial Sequence: targeting sequence/synthetic sequence
tactacaaactgcgcacagaaggagatggagtgtacaccttaaacaatgagaagcagtgg

SEQ ID NO: 5090 - DNA, 60 bp, Artificial Sequence
  Description of Artificial Sequence: targeting sequence/synthetic sequence
ttcaacgtgcggaagcagctgaacaatgccaacgtgtaccgggagggcgtggccacccag

SEQ ID NO: 5091 - DNA, 60 bp, Artificial Sequence
  Description of Artificial Sequence: targeting sequence/synthetic sequence
ctcaacaagcttctgggcaaagtcaccatcgcacagggtggcgtcctgcccaacatccag

SEQ ID NO: 5092 - DNA, 60 bp, Artificial Sequence
  Description of Artificial Sequence: targeting sequence/synthetic sequence
atgggtccaagaggggctcctggtgagcgaggacggccaggacttcctggggctgcaggt

SEQ ID NO: 5093 - DNA, 60 bp, Artificial Sequence
  Description of Artificial Sequence: targeting sequence/synthetic sequence
ttgtccatcaagcgcctggtcaccaccggtgtcctcaagcagaccaaaggggtgggggcc

SEQ ID NO: 5094 - DNA, 60 bp, Artificial Sequence
  Description of Artificial Sequence: targeting sequence/synthetic sequence
tgggacgggtcgctgagtccccaggctgccaccgtcctctttctgcacgccacacagaag

SEQ ID NO: 5095 - DNA, 60 bp, Artificial Sequence
  Description of Artificial Sequence: targeting sequence/synthetic sequence
atgggcccccgtggcctgcctggtgagagaggtcgccctggagcccctggccctgctggt

SEQ ID NO: 5096 - DNA, 60 bp, Artificial Sequence
  Description of Artificial Sequence: targeting sequence/synthetic sequence
cgcggcggcgtcaagcgtatttctggcctcatttatgaggaaactcgcggagtgctgaaa

SEQ ID NO: 5097 - DNA, 60 bp, Artificial Sequence
  Description of Artificial Sequence: targeting sequence/synthetic sequence
ttctacgagaaccagatcaccgcattcctgggccacaatggagctgggaaaaccaccacc

SEQ ID NO: 5098 - DNA, 60 bp, Artificial Sequence
  Description of Artificial Sequence: targeting sequence/synthetic sequence
tttctgaatgagataaagaagaggttccagactacttacggttcaagagcacagacagca

SEQ ID NO: 5099 - DNA, 60 bp, Artificial Sequence
  Description of Artificial Sequence: targeting sequence/synthetic sequence
ctaaacaagttgctgggtaaagtcacaattgctcagggcggtgttctgcccaacatccag

SEQ ID NO: 5100 - DNA, 60 bp, Artificial Sequence
  Description of Artificial Sequence: targeting sequence/synthetic sequence
ggatctttcatgatggtgaacagctctgggagagcctctggccagaaggcccaccttctc

SEQ ID NO: 5101 - DNA, 60 bp, Artificial Sequence
  Description of Artificial Sequence: targeting sequence/synthetic sequence
aaagtcaccatcgcacagggtggcgtcctgcccaacatccaggccgtgctgctgccaaag

SEQ ID NO: 5102 - DNA, 60 bp, Artificial Sequence
  Description of Artificial Sequence: targeting sequence/synthetic sequence
gtgaccatcgcgcagggtggcgtcctgcccaacatccaggccgtactgctgcccaagaag

SEQ ID NO: 5103 - DNA, 60 bp, Artificial Sequence
  Description of Artificial Sequence: targeting sequence/synthetic sequence
atcggcggatacctgctcggcagccggaaggtgagcggcggaggcgtgaccaaggagagc

SEQ ID NO: 5104 - DNA, 60 bp, Artificial Sequence
  Description of Artificial Sequence: targeting sequence/synthetic sequence
cctaataaatttaatacattggtaggggaaaaaggagctcaaatgagtggagggcagaaa

SEQ ID NO: 5105 - DNA, 60 bp, Artificial Sequence
  Description of Artificial Sequence: targeting sequence/synthetic sequence
ttctgcatgaagaatgagaaggtgggctcccacgggacacaagacaggcagtgcaacaag

SEQ ID NO: 5106 - DNA, 60 bp, Artificial Sequence
  Description of Artificial Sequence: targeting sequence/synthetic sequence
aaggccgtgatcctgggcggagaccccagctccggcgcccgggtggtcaccggcaaggtg

SEQ ID NO: 5107 - DNA, 60 bp, Artificial Sequence
  Description of Artificial Sequence: targeting sequence/synthetic sequence
aaccggccagatgcccgctcagccatgaaccgccacaacaacgaggctgggcgccaggcc

SEQ ID NO: 5108 - DNA, 60 bp, Artificial Sequence
  Description of Artificial Sequence: targeting sequence/synthetic sequence
ggcatcggcggatacctgctcggcagccggaaggtgagcggcggaggcgtgaccaaggag

SEQ ID NO: 5109 - DNA, 60 bp, Artificial Sequence
  Description of Artificial Sequence: targeting sequence/synthetic sequence
accatcgctcagggtggtgtcctgcccaacatccaggctgtgctactgcccaagaagacc

SEQ ID NO: 5110 - DNA, 60 bp, Artificial Sequence
  Description of Artificial Sequence: targeting sequence/synthetic sequence
cggccagatgcccgctcagccatgaaccgccacaacaacgaggctgggcgccaggccatc

SEQ ID NO: 5111 - DNA, 60 bp, Artificial Sequence
  Description of Artificial Sequence: targeting sequence/synthetic sequence
cgtgtgaccatcgcgcagggtggcgttttgcctaatattcaggcggtgctgctgcctaag

SEQ ID NO: 5112 - DNA, 60 bp, Artificial Sequence
  Description of Artificial Sequence: targeting sequence/synthetic sequence
cgcggcggtgtcaagcgaatttctggccttatctatgaggagactcgtggtgttctgaag

SEQ ID NO: 5113 - DNA, 60 bp, Artificial Sequence
  Description of Artificial Sequence: targeting sequence/synthetic sequence
agcacctcctgggacgggtcgctgagtccccaggctgccaccgtcctctttctgcacgcc

SEQ ID NO: 5114 - DNA, 60 bp, Artificial Sequence
  Description of Artificial Sequence: targeting sequence/synthetic sequence
atcgcccagggaggcgtcctgcccaacatccaggccgtgctgctgcccaagaagaccagc

SEQ ID NO: 5115 - DNA, 60 bp, Artificial Sequence
  Description of Artificial Sequence: targeting sequence/synthetic sequence
cagatgctgaaacatgcagttgtaaacttgattaactatcaagatgatgcagaacttgcc

SEQ ID NO: 5116 - DNA, 60 bp, Artificial Sequence
  Description of Artificial Sequence: targeting sequence/synthetic sequence
accattgcccagggcggcgtcttgcccaatatccaggctgtcctgttgcccaagaaaacg

SEQ ID NO: 5117 - DNA, 60 bp, Artificial Sequence
  Description of Artificial Sequence: targeting sequence/synthetic sequence
tcaggccatgttcatttatcctcagagaataaattccaaaactctgcaatcttaacaata

SEQ ID NO: 5118 - DNA, 60 bp, Artificial Sequence
  Description of Artificial Sequence: targeting sequence/synthetic sequence
aactggggaagggaagaaagacagtcggttttcccatttgaaagtgggaaaccattcaaa

SEQ ID NO: 5119 - DNA, 60 bp, Artificial Sequence
  Description of Artificial Sequence: targeting sequence/synthetic sequence
atcccaagttctcataccctgatgaaaggaggaagcaccaagtattggtcagggaattct

SEQ ID NO: 5120 - DNA, 60 bp, Artificial Sequence
  Description of Artificial Sequence: targeting sequence/synthetic sequence
agggaagaaagacagtcggttttcccatttgaaagtgggaaaccattcaaaatacaagta

SEQ ID NO: 5121 - DNA, 60 bp, Artificial Sequence
  Description of Artificial Sequence: targeting sequence/synthetic sequence
acgctgatggggaggctggaagatggcagcccccggactgggcagatcttcaagcagacc

SEQ ID NO: 5122 - DNA, 60 bp, Artificial Sequence
  Description of Artificial Sequence: targeting sequence/synthetic sequence
actagggggaaaatcacagatctgatcaaggaccttgactcgcagacaatgatggtcctg

SEQ ID NO: 5123 - DNA, 60 bp, Artificial Sequence
  Description of Artificial Sequence: targeting sequence/synthetic sequence
aaagggacaagaggacctccgggagcatctggctaccctggaaacccaggacttcccgga

SEQ ID NO: 5124 - DNA, 60 bp, Artificial Sequence
  Description of Artificial Sequence: targeting sequence/synthetic sequence
aataaatttaatacattggtaggggaaaaaggagctcaaatgagtggagggcagaaacag

SEQ ID NO: 5125 - DNA, 60 bp, Artificial Sequence
  Description of Artificial Sequence: targeting sequence/synthetic sequence
gtgaccatctacagctttccggcgcccaacgtgattctgacgaagccagaggtctcagaa

SEQ ID NO: 5126 - DNA, 60 bp, Artificial Sequence
  Description of Artificial Sequence: targeting sequence/synthetic sequence
atccaaatgctgatggggaggctggaagacggcagccacctgactgggcagaccctcaag

SEQ ID NO: 5127 - DNA, 60 bp, Artificial Sequence
  Description of Artificial Sequence: targeting sequence/synthetic sequence
ccaagttctcataccctgatgaaaggaggaagcaccaagtattggtcagggaattctgaa

SEQ ID NO: 5128 - DNA, 60 bp, Artificial Sequence
  Description of Artificial Sequence: targeting sequence/synthetic sequence
ggagacatctactactacggtatggacgtctggggccaagggaccacggtcaccgtctcc

SEQ ID NO: 5129 - DNA, 60 bp, Artificial Sequence
  Description of Artificial Sequence: targeting sequence/synthetic sequence
ctgcagagcgccaaggacaacaatatcaagttccgggccatcggccacagcgacaacagc

SEQ ID NO: 5130 - DNA, 60 bp, Artificial Sequence
  Description of Artificial Sequence: targeting sequence/synthetic sequence
gggctggtcccagccggcggctccagctccaacagcacccgagagccgcccgcctcgggt

SEQ ID NO: 5131 - DNA, 60 bp, Artificial Sequence
  Description of Artificial Sequence: targeting sequence/synthetic sequence
agcttgccgacaaccaactcaacaaccaattcagccaccaaaataacagctaataccact

SEQ ID NO: 5132 - DNA, 60 bp, Artificial Sequence
  Description of Artificial Sequence: targeting sequence/synthetic sequence
gagcgcccggccagccgggccaacaccgtgaggagcttccaccacgaagaacatctggag

SEQ ID NO: 5133 - DNA, 60 bp, Artificial Sequence
  Description of Artificial Sequence: targeting sequence/synthetic sequence
ctgatcacccaggagcccaaagaggccaactccactacgtcccagaagcagagcaagcag

SEQ ID NO: 5134 - DNA, 60 bp, Artificial Sequence
  Description of Artificial Sequence: targeting sequence/synthetic sequence
atgatacaaactctaacaaacaaatctaaaatccaaaatgtaggagggacttatgaattg

SEQ ID NO: 5135 - DNA, 60 bp, Artificial Sequence
  Description of Artificial Sequence: targeting sequence/synthetic sequence
aattccaacgctatcaagaacctgcccccaccgctgggcggcgctgcggggcacccaggc

SEQ ID NO: 5136 - DNA, 60 bp, Artificial Sequence
  Description of Artificial Sequence: targeting sequence/synthetic sequence
cgaatggacatagacgtggtggagaaaaccaataagattaaagacaggtattgggattct

SEQ ID NO: 5137 - DNA, 60 bp, Artificial Sequence
  Description of Artificial Sequence: targeting sequence/synthetic sequence
tgggtggacgatcaggaggtgatcaacaaggccagcaacagcaacaagatccggctggag

SEQ ID NO: 5138 - DNA, 60 bp, Artificial Sequence
  Description of Artificial Sequence: targeting sequence/synthetic sequence
ctggaggtttccagcttgccgacaaccaactcaacaaccaattcagccaccaaaataaca

SEQ ID NO: 5139 - DNA, 60 bp, Artificial Sequence
  Description of Artificial Sequence: targeting sequence/synthetic sequence
atagacgtggtggagaaaaccaataagattaaagacaggtattgggattctggtcccaga

SEQ ID NO: 5140 - DNA, 60 bp, Artificial Sequence
  Description of Artificial Sequence: targeting sequence/synthetic sequence
agatggaacagacaaagcagcacatctgtcattgaaacaaataaaacatcggtggagctt

SEQ ID NO: 5141 - DNA, 60 bp, Artificial Sequence
  Description of Artificial Sequence: targeting sequence/synthetic sequence
ttgccgacaaccaactcaacaaccaattcagccaccaaaataacagctaataccactgat

SEQ ID NO: 5142 - DNA, 60 bp, Artificial Sequence
  Description of Artificial Sequence: targeting sequence/synthetic sequence
gtgactaataatgtaaaagacgtcactaaattggtggcaaatcttccaaaagactacatg

SEQ ID NO: 5143 - DNA, 60 bp, Artificial Sequence
  Description of Artificial Sequence: targeting sequence/synthetic sequence
aatcgtgtgactaataatgtaaaagacgtcactaaattggtggcaaatcttccaaaagac

SEQ ID NO: 5144 - DNA, 60 bp, Artificial Sequence
  Description of Artificial Sequence: targeting sequence/synthetic sequence
acctggctggttcgccacacagagaatgtcaccaagacaaagacacctgaggactatgct

SEQ ID NO: 5145 - DNA, 60 bp, Artificial Sequence
  Description of Artificial Sequence: targeting sequence/synthetic sequence
tggctggttcgccacacagagaatgtcaccaagacaaagacacctgaggactatgctgac

SEQ ID NO: 5146 - DNA, 60 bp, Artificial Sequence
  Description of Artificial Sequence: targeting sequence/synthetic sequence
gccgagatcctggagctggcgggcaatgcggcccgcgacaacaagaagacccgcatcatc

SEQ ID NO: 5147 - DNA, 60 bp, Artificial Sequence
  Description of Artificial Sequence: targeting sequence/synthetic sequence
attgatcaggaagaactaaacaagaccaagcctatttggaccagaaaccctgatgacatc

SEQ ID NO: 5148 - DNA, 60 bp, Artificial Sequence
  Description of Artificial Sequence: targeting sequence/synthetic sequence
gagaaatacattgatcaggaagaactaaacaagaccaagcctatttggaccagaaaccct

SEQ ID NO: 5149 - DNA, 60 bp, Artificial Sequence
  Description of Artificial Sequence: targeting sequence/synthetic sequence
gaacagctgatcacccaggagcccaaagaggccaactccactacgtcccagaagcagagc

SEQ ID NO: 5150 - DNA, 60 bp, Artificial Sequence
  Description of Artificial Sequence: targeting sequence/synthetic sequence
caaactctaacaaacaaatctaaaatccaaaatgtaggagggacttatgaattgcatgtt

SEQ ID NO: 5151 - DNA, 60 bp, Artificial Sequence
  Description of Artificial Sequence: targeting sequence/synthetic sequence
atgtgggtggacgatcaggaggtgatcaacaaggccagcaacagcaacaagatccggctg

SEQ ID NO: 5152 - DNA, 60 bp, Artificial Sequence
  Description of Artificial Sequence: targeting sequence/synthetic sequence
ttggagagggcagccagccgagccaacactgtgcgcagcttccaccatgaagaatctttg

SEQ ID NO: 5153 - DNA, 60 bp, Artificial Sequence
  Description of Artificial Sequence: targeting sequence/synthetic sequence
gtgggcgccgctaccagccgggacgccctgcccaacaccgaggccagcggccccacccac

SEQ ID NO: 5154 - DNA, 60 bp, Artificial Sequence
  Description of Artificial Sequence: targeting sequence/synthetic sequence
atacaaactctaacaaacaaatctaaaatccaaaatgtaggagggacttatgaattgcat

SEQ ID NO: 5155 - DNA, 60 bp, Artificial Sequence
  Description of Artificial Sequence: targeting sequence/synthetic sequence
ctgggcgccgctggcagcaccatgggcgccgctgccgtgaccctgaccgtgcaggcccgg

SEQ ID NO: 5156 - DNA, 60 bp, Artificial Sequence
  Description of Artificial Sequence: targeting sequence/synthetic sequence
gtgctgagcgccgctggcagcaccatgggcgccgctgccaccgccctgaccgtgcggacc

SEQ ID NO: 5157 - DNA, 60 bp, Artificial Sequence
  Description of Artificial Sequence: targeting sequence/synthetic sequence
caatcgctgaagtgtgaggcagcagccggtaatccccagccttcctaccgttggttcaag

SEQ ID NO: 5158 - DNA, 60 bp, Artificial Sequence
  Description of Artificial Sequence: targeting sequence/synthetic sequence
tgtgaggcagcagccggtaatccccagccttcctaccgttggttcaaggatggcaaggag

SEQ ID NO: 5159 - DNA, 60 bp, Artificial Sequence
  Description of Artificial Sequence: targeting sequence/synthetic sequence
ctgggcggactgaccatgggcggaatcgccgctggcgtgggcaccggcaccacagccctg

SEQ ID NO: 5160 - DNA, 60 bp, Artificial Sequence
  Description of Artificial Sequence: targeting sequence/synthetic sequence
cgcctgctgctgcctggggaactggccaagcacgccgtgtccgagggcactaaggccgtc

SEQ ID NO: 5161 - DNA, 60 bp, Artificial Sequence
  Description of Artificial Sequence: targeting sequence/synthetic sequence
atcacccagatccagcccagcatccagaccggcagcgaggaaatcaagagcctgtacaac

SEQ ID NO: 5162 - DNA, 60 bp, Artificial Sequence
  Description of Artificial Sequence: targeting sequence/synthetic sequence
cagctgcagcccagcctgaagaccggcagcgaggaactgaccagcctgtacaacaccgtg

SEQ ID NO: 5163 - DNA, 60 bp, Artificial Sequence
  Description of Artificial Sequence: targeting sequence/synthetic sequence
gagcttctcaaccaggcccaggaacattttggcaaagacaaatcaaaagaattccaacta

SEQ ID NO: 5164 - DNA, 60 bp, Artificial Sequence
  Description of Artificial Sequence: targeting sequence/synthetic sequence
gccggctcacactcacaggcagccaactttgcagcccagaagacccaccaggaccagtac

SEQ ID NO: 5165 - DNA, 60 bp, Artificial Sequence
  Description of Artificial Sequence: targeting sequence/synthetic sequence
agcaatgtgcatgtgtctgtggccggctcacactcacaggcagccaactttgcagcccag

SEQ ID NO: 5166 - DNA, 60 bp, Artificial Sequence
  Description of Artificial Sequence: targeting sequence/synthetic sequence
gcggctggcgcaaccgctcgcgcaacgacagcctcgcggcttccttcatctgcggtaaca

SEQ ID NO: 5167 - DNA, 60 bp, Artificial Sequence
  Description of Artificial Sequence: targeting sequence/synthetic sequence
aacgccgtggcccgggtggccgacaccatcggcagcggccccagcaacagccaggccgtg

SEQ ID NO: 5168 - DNA, 60 bp, Artificial Sequence
  Description of Artificial Sequence: targeting sequence/synthetic sequence
cagctgcagagctccctgcagaccggcagcgaggaactgaagagcctgtacaacaccgtg

SEQ ID NO: 5169 - DNA, 60 bp, Artificial Sequence
  Description of Artificial Sequence: targeting sequence/synthetic sequence
agcggcccaagcgtcctgggcacgggcacgggtggcagcggtggcttccacctggcccag

SEQ ID NO: 5170 - DNA, 60 bp, Artificial Sequence
  Description of Artificial Sequence: targeting sequence/synthetic sequence
acatctgccctggccggccagagacaggggactcaggcggaatccaacctgagtagtaaa

SEQ ID NO: 5171 - DNA, 60 bp, Artificial Sequence
  Description of Artificial Sequence: targeting sequence/synthetic sequence
gttgtcaaggacagcaccatcggtggctcaccacagcctcgcccctctgtcggggccttc

SEQ ID NO: 5172 - DNA, 60 bp, Artificial Sequence
  Description of Artificial Sequence: targeting sequence/synthetic sequence
caagtggacatcaacgggttcactaccggccgccgaggtgacctggccaccattcatggc

SEQ ID NO: 5173 - DNA, 60 bp, Artificial Sequence
  Description of Artificial Sequence: targeting sequence/synthetic sequence
tctgtggccggctcacactcacaggcagccaactttgcagcccagaagacccaccaggac

SEQ ID NO: 5174 - DNA, 60 bp, Artificial Sequence
  Description of Artificial Sequence: targeting sequence/synthetic sequence
agccacacgtggagcctggaacgttctgagagcctgacttctgactcccagtcggggatc

SEQ ID NO: 5175 - DNA, 60 bp, Artificial Sequence
  Description of Artificial Sequence: targeting sequence/synthetic sequence
gccaccgccggcagcgccatgggcgccgctagcctgaccgtgagcgcccagagccggacc

SEQ ID NO: 5176 - DNA, 60 bp, Artificial Sequence
  Description of Artificial Sequence: targeting sequence/synthetic sequence
tgcttcgacagctccgtgggcagcggcagcatccagggcgccacccccggcggacggtgc

SEQ ID NO: 5177 - DNA, 60 bp, Artificial Sequence
  Description of Artificial Sequence: targeting sequence/synthetic sequence
ttcacacaggagaccatcgaccgcttggcgggtaaacccacccatgtcaatgtgtctgtt

SEQ ID NO: 5178 - DNA, 60 bp, Artificial Sequence
  Description of Artificial Sequence: targeting sequence/synthetic sequence
gagctgacccagtcgcaggcatcgctgcagtcggcgtcatctgtgggctctgcccgtggc

SEQ ID NO: 5179 - DNA, 60 bp, Artificial Sequence
  Description of Artificial Sequence: targeting sequence/synthetic sequence
gtcgccgcttgtgtactaccaggtgccgggggaacctgtcctgaaagagcacttgagcga

SEQ ID NO: 5180 - DNA, 60 bp, Artificial Sequence
  Description of Artificial Sequence: targeting sequence/synthetic sequence
gagtccaagaccccgctaaccgccaccctctcaaaatccggaaacacattccggcccgag

SEQ ID NO: 5181 - DNA, 60 bp, Artificial Sequence
  Description of Artificial Sequence: targeting sequence/synthetic sequence
gactccccacacagcgagaggtacgtgtcggccctgaccacgcccgcgcgcctctcgccc

SEQ ID NO: 5182 - DNA, 60 bp, Artificial Sequence
  Description of Artificial Sequence: targeting sequence/synthetic sequence
ggcgccagactggccgagtaccacgccaaggccaccgagcatctgagcacgctcagcgag

SEQ ID NO: 5183 - DNA, 60 bp, Artificial Sequence
  Description of Artificial Sequence: targeting sequence/synthetic sequence
accgccggcgccgctatgggcgccgctagcctgaccctgagcgcccagagccggaccagc

SEQ ID NO: 5184 - DNA, 60 bp, Artificial Sequence
  Description of Artificial Sequence: targeting sequence/synthetic sequence
cggaccctgttcgcccgggcccagggcatcgaggaaaccatcgacaccgtgatcagcaac

SEQ ID NO: 5185 - DNA, 60 bp, Artificial Sequence
  Description of Artificial Sequence: targeting sequence/synthetic sequence
ttggccgaggacgtgcgtggcaacctgaggggcaacaccgaggggctgcagaagtcactg

SEQ ID NO: 5186 - DNA, 60 bp, Artificial Sequence
  Description of Artificial Sequence: targeting sequence/synthetic sequence
ctgacagcggagattctggagctggctggcaatgcagcgagagacaacaagaagggacgg

SEQ ID NO: 5187 - DNA, 60 bp, Artificial Sequence
  Description of Artificial Sequence: targeting sequence/synthetic sequence
cccgccaacggctcgctggggcccacgttgaacctgagcagcggggagtcgcgcctgctg

SEQ ID NO: 5188 - DNA, 60 bp, Artificial Sequence
  Description of Artificial Sequence: targeting sequence/synthetic sequence
accgccggcgtggccatgggcaccgccagcctgaccctgagcgcccagagccggaccctg

SEQ ID NO: 5189 - DNA, 60 bp, Artificial Sequence
  Description of Artificial Sequence: targeting sequence/synthetic sequence
accaacgacacctacatggtggccggcacccccggcacctaccggaccggcaccagcgtg

SEQ ID NO: 5190 - DNA, 60 bp, Artificial Sequence
  Description of Artificial Sequence: targeting sequence/synthetic sequence
ctggccaccgccggcagcgccatgggcgccgctagcctgaccctgagcgcccagagccgg

SEQ ID NO: 5191 - DNA, 60 bp, Artificial Sequence
  Description of Artificial Sequence: targeting sequence/synthetic sequence
gcccgggtggccgacaccatcggcagcggccccagcaacagccaggccgtgcccgccctg

SEQ ID NO: 5192 - DNA, 60 bp, Artificial Sequence
  Description of Artificial Sequence: targeting sequence/synthetic sequence
aagtctcccgccaacggctcgctggggcccacgttgaacctgagcagcggggagtcgcgc

SEQ ID NO: 5193 - DNA, 60 bp, Artificial Sequence
  Description of Artificial Sequence: targeting sequence/synthetic sequence
cggcagctgcagcccagcctgcagaccggcaccgaggaaatcaagagcctgtacaacgcc

SEQ ID NO: 5194 - DNA, 60 bp, Artificial Sequence
  Description of Artificial Sequence: targeting sequence/synthetic sequence
gccgaggacgtgcgtggcaacctgaggggcaacaccgaggggctgcagaagtcactggca

SEQ ID NO: 5195 - DNA, 60 bp, Artificial Sequence
  Description of Artificial Sequence: targeting sequence/synthetic sequence
ggcagcggcccaagcgtcctgggcacgggcacgggtggcagcggtggcttccacctggcc

SEQ ID NO: 5196 - DNA, 60 bp, Artificial Sequence
  Description of Artificial Sequence: targeting sequence/synthetic sequence
acagacacgaccatcacagtgatgctgaaacccgctcagtcccggggagctcctgtcagt

SEQ ID NO: 5197 - DNA, 60 bp, Artificial Sequence
  Description of Artificial Sequence: targeting sequence/synthetic sequence
tcggagctgacccagtcgcaggcatcgctgcagtcggcgtcatctgtgggctctgcccgt

SEQ ID NO: 5198 - DNA, 60 bp, Artificial Sequence
  Description of Artificial Sequence: targeting sequence/synthetic sequence
cctaagcccaccagcaatgtgcatgtgtctgtggccggctcacactcacaggcagccaac

SEQ ID NO: 5199 - DNA, 60 bp, Artificial Sequence
  Description of Artificial Sequence: targeting sequence/synthetic sequence
atctctcgtcccgctgcgcccccagagccgcggccgcagcaacagccgcagccccgcagc

SEQ ID NO: 5200 - DNA, 60 bp, Artificial Sequence
  Description of Artificial Sequence: targeting sequence/synthetic sequence
accctgttcgcccgggcccagggcatcgaggaaaccatcgacaccgtgatcagcaacgcc

SEQ ID NO: 5201 - DNA, 60 bp, Artificial Sequence
  Description of Artificial Sequence: targeting sequence/synthetic sequence
cagagcagaagtgtgcctccttcagcctcccatgtggcacccacagaaacattcacctat

SEQ ID NO: 5202 - DNA, 60 bp, Artificial Sequence
  Description of Artificial Sequence: targeting sequence/synthetic sequence
gctgtgcgcctgctgctgccggggcagatgggcaagctcgccgagtccgaaggcacgaag

SEQ ID NO: 5203 - DNA, 60 bp, Artificial Sequence
  Description of Artificial Sequence: targeting sequence/synthetic sequence
atgcggcagctgcagcccagcctgcagaccggcaccgaggaaatcaagagcctgtacaac

SEQ ID NO: 5204 - DNA, 60 bp, Artificial Sequence
  Description of Artificial Sequence: targeting sequence/synthetic sequence
ttgaatgagacagacacgaccatcacagtgatgctgaaacccgctcagtcccggggagct

SEQ ID NO: 5205 - DNA, 60 bp, Artificial Sequence
  Description of Artificial Sequence: targeting sequence/synthetic sequence
cggagcatcgtgcgggtggccgacaccctgcccagcggccccagcaacagcgagagcatc

SEQ ID NO: 5206 - DNA, 60 bp, Artificial Sequence
  Description of Artificial Sequence: targeting sequence/synthetic sequence
cagctgcagcccagcctgcagaccggcagcgaggaactgaagagcctgtacaacaccgtg

SEQ ID NO: 5207 - DNA, 60 bp, Artificial Sequence
  Description of Artificial Sequence: targeting sequence/synthetic sequence
gtcgtcgccgcttgtgtactaccaggtgccgggggaacctgtcctgaaagagcacttgag

SEQ ID NO: 5208 - DNA, 60 bp, Artificial Sequence
  Description of Artificial Sequence: targeting sequence/synthetic sequence
tcctcacagtcccagggcatatccagctcctctaccagcacgatgccaaactccagccag

SEQ ID NO: 5209 - DNA, 60 bp, Artificial Sequence
  Description of Artificial Sequence: targeting sequence/synthetic sequence
atgggcggaatcgccgctggcgtgggcaccggcaccacagccctggtggccaccaagcag

SEQ ID NO: 5210 - DNA, 60 bp, Artificial Sequence
  Description of Artificial Sequence: targeting sequence/synthetic sequence
cagcccgccatccagaccggcaccgaggaactgcggagcctgtacaacaccgtggccacc

SEQ ID NO: 5211 - DNA, 60 bp, Artificial Sequence
  Description of Artificial Sequence: targeting sequence/synthetic sequence
cggcagatcctgggccagctgcagcccagcctgcagaccggcagcgaggaactgcggagc

SEQ ID NO: 5212 - DNA, 60 bp, Artificial Sequence
  Description of Artificial Sequence: targeting sequence/synthetic sequence
gccgtacgcctgctgctgcccggggagctggctaagcacgccgtgtcagagggcaccaag

SEQ ID NO: 5213 - DNA, 60 bp, Artificial Sequence
  Description of Artificial Sequence: targeting sequence/synthetic sequence
agcatcggccgggtggccgacaccatcggcagcggccccagcaacagcgaggccatcccc

SEQ ID NO: 5214 - DNA, 60 bp, Artificial Sequence
  Description of Artificial Sequence: targeting sequence/synthetic sequence
agtggtgcgggtggggcggccaatggcactggggcaggggcagtcatgggccccaacgcc

SEQ ID NO: 5215 - DNA, 60 bp, Artificial Sequence
  Description of Artificial Sequence: targeting sequence/synthetic sequence
cagcgtgaaggcagcctccaagttggtaacgaagcgccggtaacaggaagttcaccgctg

SEQ ID NO: 5216 - DNA, 60 bp, Artificial Sequence
  Description of Artificial Sequence: targeting sequence/synthetic sequence
ccaagcgtcctgggcacgggcacgggtggcagcggtggcttccacctggcccagcaggcc

SEQ ID NO: 5217 - DNA, 60 bp, Artificial Sequence
  Description of Artificial Sequence: targeting sequence/synthetic sequence
gccgctggcagcaccatgggcgccgctagcgtgaccctgaccgtgcaggcccggcagctg

SEQ ID NO: 5218 - DNA, 60 bp, Artificial Sequence
  Description of Artificial Sequence: targeting sequence/synthetic sequence
ttcgacagctccgtgggcagcggcagcatccagggcgccacccccggcggacggtgcaac

SEQ ID NO: 5219 - DNA, 60 bp, Artificial Sequence
  Description of Artificial Sequence: targeting sequence/synthetic sequence
gccggcgccgctatgggcgccgctagcctgaccctgagcgcccagagccggaccagcctg

SEQ ID NO: 5220 - DNA, 60 bp, Artificial Sequence
  Description of Artificial Sequence: targeting sequence/synthetic sequence
agcgccctggccatgggcgccggcgtggccggcggaatcaccggcagcatgagcctggcc

SEQ ID NO: 5221 - DNA, 60 bp, Artificial Sequence
  Description of Artificial Sequence: targeting sequence/synthetic sequence
gaggagctcaacaagctgctgggccgcgtgaccatcgcgcagggtggcgtcctgcccaac

SEQ ID NO: 5222 - DNA, 60 bp, Artificial Sequence
  Description of Artificial Sequence: targeting sequence/synthetic sequence
aacaagttactcgggggtgtcaccattgcccagggcggcgtcttgcccaatatccaggct

SEQ ID NO: 5223 - DNA, 60 bp, Artificial Sequence
  Description of Artificial Sequence: targeting sequence/synthetic sequence
ggtgcgggtggggcggccaatggcactggggcaggggcagtcatgggccccaacgccacc

SEQ ID NO: 5224 - DNA, 60 bp, Artificial Sequence
  Description of Artificial Sequence: targeting sequence/synthetic sequence
ctggtgagcgccctggccatcggcgccggcgtggccggcggaatcaccggcagcatgagc

SEQ ID NO: 5225 - DNA, 60 bp, Artificial Sequence
  Description of Artificial Sequence: targeting sequence/synthetic sequence
tacgtggacggcgtggaggtgcataatgccaagacaaagccacgggaggagcagttcaac

SEQ ID NO: 5226 - DNA, 60 bp, Artificial Sequence
  Description of Artificial Sequence: targeting sequence/synthetic sequence
gccctggccatgggcgccggcatggccggcggaatcaccggcagcatgagcctggccagc

SEQ ID NO: 5227 - DNA, 60 bp, Artificial Sequence
  Description of Artificial Sequence: targeting sequence/synthetic sequence
ggcgtggaggtgcataatgccaagacaaagccgcgggaggagcagtacaacagcacgtac

SEQ ID NO: 5228 - DNA, 60 bp, Artificial Sequence
  Description of Artificial Sequence: targeting sequence/synthetic sequence
acccagtcgcaggcatcgctgcagtcggcgtcatctgtgggctctgcccgtggcgacgag

SEQ ID NO: 5229 - DNA, 60 bp, Artificial Sequence
  Description of Artificial Sequence: targeting sequence/synthetic sequence
aagcttctgggcaaagtcaccatcgcacagggtggcgtcctgcccaacatccaggccgtg

SEQ ID NO: 5230 - DNA, 60 bp, Artificial Sequence
  Description of Artificial Sequence: targeting sequence/synthetic sequence
agactggccgagtaccacgccaaggccaccgagcatctgagcacgctcagcgagaaggcc

SEQ ID NO: 5231 - DNA, 60 bp, Artificial Sequence
  Description of Artificial Sequence: targeting sequence/synthetic sequence
accatgggcggaatcgccgctggcgtgggcaccggcaccacagccctggtggccaccaag

SEQ ID NO: 5232 - DNA, 60 bp, Artificial Sequence
  Description of Artificial Sequence: targeting sequence/synthetic sequence
acggccgtgcgcctgctgctgcccggggagttggccaagcacgccgtgtccgagggcacc

SEQ ID NO: 5233 - DNA, 60 bp, Artificial Sequence
  Description of Artificial Sequence: targeting sequence/synthetic sequence
caccgggagcagcgtgaaggcagcctccaagttggtaacgaagcgccggtaacaggaagt

SEQ ID NO: 5234 - DNA, 60 bp, Artificial Sequence
  Description of Artificial Sequence: targeting sequence/synthetic sequence
aagatcattagcgtgctggagcccctggtgcccaccggcagcgagaacctgaagagcctg

SEQ ID NO: 5235 - DNA, 60 bp, Artificial Sequence
  Description of Artificial Sequence: targeting sequence/synthetic sequence
ggcttcctgggcgccgctggcagcaccatgggcgccgctagcatcaccctgaccgcccag

SEQ ID NO: 5236 - DNA, 60 bp, Artificial Sequence
  Description of Artificial Sequence: targeting sequence/synthetic sequence
ctgctgctgcctggggaactggccaagcacgccgtgtccgagggcactaaggccgtcacc

SEQ ID NO: 5237 - DNA, 60 bp, Artificial Sequence
  Description of Artificial Sequence: targeting sequence/synthetic sequence
tacctgactgccgagatcctggagctggcgggcaacgccgcccgcgacaacaagaagacc

SEQ ID NO: 5238 - DNA, 60 bp, Artificial Sequence
  Description of Artificial Sequence: targeting sequence/synthetic sequence
gtacgcctgctgctgcccggggagctggctaagcacgccgtgtcagagggcaccaaggcc

SEQ ID NO: 5239 - DNA, 60 bp, Artificial Sequence
  Description of Artificial Sequence: targeting sequence/synthetic sequence
gccaccgccggcagcgccatgggcgccgctagcctgaccctgagcgcccaccccggcctg

SEQ ID NO: 5240 - DNA, 60 bp, Artificial Sequence
  Description of Artificial Sequence: targeting sequence/synthetic sequence
accatcattaacccccggagctccctggtgctggccgctaccagcggcaacagcggcacc

SEQ ID NO: 5241 - DNA, 60 bp, Artificial Sequence
  Description of Artificial Sequence: targeting sequence/synthetic sequence
caacagtcttacctggactctggaatccattctggtgccactaccacagctccttctctg

SEQ ID NO: 5242 - DNA, 60 bp, Artificial Sequence
  Description of Artificial Sequence: targeting sequence/synthetic sequence
atcaaccccaagagcgccctggtgctgagcgccgagagctccagcatgggcggaaccctg

SEQ ID NO: 5243 - DNA, 60 bp, Artificial Sequence
  Description of Artificial Sequence: targeting sequence/synthetic sequence
tcccagggcatatccagctcctctaccagcacgatgccaaactccagccagtcctctcac

SEQ ID NO: 5244 - DNA, 60 bp, Artificial Sequence
  Description of Artificial Sequence: targeting sequence/synthetic sequence
ttcctgggcgccgctggcagcaccatgggcgccgctagcgtgaccctgaccgtgcaggcc

SEQ ID NO: 5245 - DNA, 60 bp, Artificial Sequence
  Description of Artificial Sequence: targeting sequence/synthetic sequence
atcattacccagatccagcccagcatccagaccggcagcgaggaaatcaagagcctgtac

SEQ ID NO: 5246 - DNA, 60 bp, Artificial Sequence
  Description of Artificial Sequence: targeting sequence/synthetic sequence
gccggcgtggccatgggcaccgccagcctgaccctgagcgcccagagccggaccctgctc

SEQ ID NO: 5247 - DNA, 60 bp, Artificial Sequence
  Description of Artificial Sequence: targeting sequence/synthetic sequence
atcattggccagctgcagcccagcatccagaccggcagcgaggaaatccggagcctgtac

SEQ ID NO: 5248 - DNA, 60 bp, Artificial Sequence
  Description of Artificial Sequence: targeting sequence/synthetic sequence
cactggcagcaacagtcttacctggactctggaatccattctggtgccactaccacagct

SEQ ID NO: 5249 - DNA, 60 bp, Artificial Sequence
  Description of Artificial Sequence: targeting sequence/synthetic sequence
ggccagctgcagagctccctgcagaccggcagcgaggaactgaagagcctgtacaacgcc

SEQ ID NO: 5250 - DNA, 60 bp, Artificial Sequence
  Description of Artificial Sequence: targeting sequence/synthetic sequence
ggcacgcagggccgcctctgcaacaagacctcggagggcatggatggctgtgagctcatg

SEQ ID NO: 5251 - DNA, 60 bp, Artificial Sequence
  Description of Artificial Sequence: targeting sequence/synthetic sequence
aattacaacccccagagcagaagtgtgcctccttcagcctcccatgtggcacccacagaa

SEQ ID NO: 5252 - DNA, 60 bp, Artificial Sequence
  Description of Artificial Sequence: targeting sequence/synthetic sequence
gtgagccgggtggccgacaccatcatgagcggccccagcaacagccagcaagtgcccgcc

SEQ ID NO: 5253 - DNA, 60 bp, Artificial Sequence
  Description of Artificial Sequence: targeting sequence/synthetic sequence
ccccagagcagaagtgtgcctccttcagcctcccatgtggcacccacagaaacattcacc

SEQ ID NO: 5254 - DNA, 60 bp, Artificial Sequence
  Description of Artificial Sequence: targeting sequence/synthetic sequence
gtggacatcaacgggttcactaccggccgccgaggtgacctggccaccattcatggcatg

SEQ ID NO: 5255 - DNA, 60 bp, Artificial Sequence
  Description of Artificial Sequence: targeting sequence/synthetic sequence
ccagagaccccagttgtcaaggacagcaccatcggtggctcaccacagcctcgcccctct

SEQ ID NO: 5256 - DNA, 60 bp, Artificial Sequence
  Description of Artificial Sequence: targeting sequence/synthetic sequence
ctggccaccgccggcagcgccatgggcgccgctagcctgaccgtgagcgcccagagccgg

SEQ ID NO: 5257 - DNA, 60 bp, Artificial Sequence
  Description of Artificial Sequence: targeting sequence/synthetic sequence
ctcccaaacaggacttctggattgttggagacaaacttcactgcctcagccagaactact

SEQ ID NO: 5258 - DNA, 60 bp, Artificial Sequence
  Description of Artificial Sequence: targeting sequence/synthetic sequence
gaggccaccctggtggaggaacaggacaccaacttcgtgtgccggagaaccttcgtggac

SEQ ID NO: 5259 - DNA, 60 bp, Artificial Sequence
  Description of Artificial Sequence: targeting sequence/synthetic sequence
ggcagcgtgggcacgcagggccgtctctgcaaccgcacgtcgcccggcgcggacggctgt

SEQ ID NO: 5260 - DNA, 60 bp, Artificial Sequence
  Description of Artificial Sequence: targeting sequence/synthetic sequence
acggccgttcgcctgctgctgcccggcgagctggccaagcacgccgtgtccgagggcacc

SEQ ID NO: 5261 - DNA, 60 bp, Artificial Sequence
  Description of Artificial Sequence: targeting sequence/synthetic sequence
accctggtggaggaacaggacaccaacttcgtgtgccggagaaccttcgtggaccggggc

SEQ ID NO: 5262 - DNA, 60 bp, Artificial Sequence
  Description of Artificial Sequence: targeting sequence/synthetic sequence
gagatccagacggccgtgcgcctgctgcttccgggggagctggccaagcacgccgtgtcg

SEQ ID NO: 5263 - DNA, 60 bp, Artificial Sequence
  Description of Artificial Sequence: targeting sequence/synthetic sequence
ggcgccgctggcagcaccatgggcgccgtgagcctgaccctgaccgtgcaggcccggcag

SEQ ID NO: 5264 - DNA, 60 bp, Artificial Sequence
  Description of Artificial Sequence: targeting sequence/synthetic sequence
cagacagcagtgcgcttgctactgccgggagagctggctaaacatgctgtgtctgagggc

SEQ ID NO: 5265 - DNA, 60 bp, Artificial Sequence
  Description of Artificial Sequence: targeting sequence/synthetic sequence
ctgcaagtggacatcaacgggttcactaccggccgccgaggtgacctggccaccattcat

SEQ ID NO: 5266 - DNA, 60 bp, Artificial Sequence
  Description of Artificial Sequence: targeting sequence/synthetic sequence
aaggcctggcacaccacaaacgacacctacatggtggccggcacccccggcacctaccgg

SEQ ID NO: 5267 - DNA, 60 bp, Artificial Sequence
  Description of Artificial Sequence: targeting sequence/synthetic sequence
agcaccatgggcgccaccagcatggccctgaccgtgcaggcccggcagctgctcagcggc

SEQ ID NO: 5268 - DNA, 60 bp, Artificial Sequence
  Description of Artificial Sequence: targeting sequence/synthetic sequence
aaggctggccggggggcctctcagccgcccacccccacccctgcctcggatgcttttcag

SEQ ID NO: 5269 - DNA, 60 bp, Artificial Sequence
  Description of Artificial Sequence: targeting sequence/synthetic sequence
accatcattaaccccaagagcgccctggtgctgagcgccgagagctccagcatgggcgga

SEQ ID NO: 5270 - DNA, 60 bp, Artificial Sequence
  Description of Artificial Sequence: targeting sequence/synthetic sequence
ctgggcgccgctggcagcaccatgggcgccgtgagcctgaccctgaccgtgcaggcccgg

SEQ ID NO: 5271 - DNA, 60 bp, Artificial Sequence
  Description of Artificial Sequence: targeting sequence/synthetic sequence
ggcttcctggccatggccggcagcgccatgggcgccaccagcctgaccctgagcgcccag

SEQ ID NO: 5272 - DNA, 60 bp, Artificial Sequence
  Description of Artificial Sequence: targeting sequence/synthetic sequence
gctgagcccacgaaggctggccggggggcctctcagccgcccacccccacccctgcctcg

SEQ ID NO: 5273 - DNA, 60 bp, Artificial Sequence
  Description of Artificial Sequence: targeting sequence/synthetic sequence
accccactaaccgccaacatcacaaaatccggaaacacattccggcccgaggtccacctg

SEQ ID NO: 5274 - DNA, 60 bp, Artificial Sequence
  Description of Artificial Sequence: targeting sequence/synthetic sequence
catgtccagctgcaaaattattcaaaggtggaaaggcatcctgtgactgcattggagaaa

SEQ ID NO: 5275 - DNA, 60 bp, Artificial Sequence
  Description of Artificial Sequence: targeting sequence/synthetic sequence
gtcaataaggaaattcaaaatgctgtcaacggggtgaaacagataaagactctcatagaa

SEQ ID NO: 5276 - DNA, 60 bp, Artificial Sequence
  Description of Artificial Sequence: targeting sequence/synthetic sequence
tcttctactcaaaacaaaagagccaacagaacagaagaaaatgtttcagacggttcccca

SEQ ID NO: 5277 - DNA, 60 bp, Artificial Sequence
  Description of Artificial Sequence: targeting sequence/synthetic sequence
gaggtcacctggctggttcgccacacagagaatgtcaccaagacaaagacacctgaggac

SEQ ID NO: 5278 - DNA, 60 bp, Artificial Sequence
  Description of Artificial Sequence: targeting sequence/synthetic sequence
tctcgtcccgctgcgcccccagagccgcggccgcagcaacagccgcagccccgcagcccc

SEQ ID NO: 5279 - DNA, 60 bp, Artificial Sequence
  Description of Artificial Sequence: targeting sequence/synthetic sequence
accatgtgggtggacgatcaggaggtgatcaacaaggccagcaacagcaacaagatccgg

SEQ ID NO: 5280 - DNA, 60 bp, Artificial Sequence
  Description of Artificial Sequence: targeting sequence/synthetic sequence
gccgagatcctggagctggctggcaacgcggcccgcgacaacaagaagactcgcatcatc

SEQ ID NO: 5281 - DNA, 60 bp, Artificial Sequence
  Description of Artificial Sequence: targeting sequence/synthetic sequence
gacaatgtggagaggacaaataaaatcaaggatgggtactgggaccctggtcctcgagct

SEQ ID NO: 5282 - DNA, 60 bp, Artificial Sequence
  Description of Artificial Sequence: targeting sequence/synthetic sequence
cagctgatcacccaggagcccaaagaggccaactccactacgtcccagaagcagagcaag

SEQ ID NO: 5283 - DNA, 60 bp, Artificial Sequence
  Description of Artificial Sequence: targeting sequence/synthetic sequence
aacagccagaccatcccccagatcagcaaccggaccctgaacaccctggtgcaggacaac

SEQ ID NO: 5284 - DNA, 60 bp, Artificial Sequence
  Description of Artificial Sequence: targeting sequence/synthetic sequence
cgtcccgctgcgcccccagagccgcggccgcagcaacagccgcagccccgcagccccgca

SEQ ID NO: 5285 - DNA, 60 bp, Artificial Sequence
  Description of Artificial Sequence: targeting sequence/synthetic sequence
gtggagaaaaccaataagattaaagacaggtattgggattctggtcccagagctgatccc

SEQ ID NO: 5286 - DNA, 60 bp, Artificial Sequence
  Description of Artificial Sequence: targeting sequence/synthetic sequence
gaggccgtgctcgccctgtacaacagcacccgcgaccgggtggccggggagagtgcagaa

SEQ ID NO: 5287 - DNA, 60 bp, Artificial Sequence
  Description of Artificial Sequence: targeting sequence/synthetic sequence
gcagaaatccttgagctggcaggcaatgcgtctcgcgataacaaaaaaactcgcattatt

SEQ ID NO: 5288 - DNA, 60 bp, Artificial Sequence
  Description of Artificial Sequence: targeting sequence/synthetic sequence
ctgatcagcaacctgagcaacaccatcgagaagatcaacaccctgggcctggacagcaag

SEQ ID NO: 5289 - DNA, 60 bp, Artificial Sequence
  Description of Artificial Sequence: targeting sequence/synthetic sequence
aaggtacaggggctggtcccagccggcggctccagctccaacagcacccgagagccgccc

SEQ ID NO: 5290 - DNA, 60 bp, Artificial Sequence
  Description of Artificial Sequence: targeting sequence/synthetic sequence
gccgtgctcgccctgtacaacagcacccgcgaccgggtggccggggagagtgcagaaccg

SEQ ID NO: 5291 - DNA, 60 bp, Artificial Sequence
  Description of Artificial Sequence: targeting sequence/synthetic sequence
ttcgagaccaacagctccaacatcagcctgcggaacaattacatgcccagcaaccacggc

SEQ ID NO: 5292 - DNA, 60 bp, Artificial Sequence
  Description of Artificial Sequence: targeting sequence/synthetic sequence
gtggacgatcaggaggtgatcaacaaggccagcaacagcaacaagatccggctggagaag

SEQ ID NO: 5293 - DNA, 60 bp, Artificial Sequence
  Description of Artificial Sequence: targeting sequence/synthetic sequence
gacatgatacaaactctaacaaacaaatctaaaatccaaaatgtaggagggacttatgaa

SEQ ID NO: 5294 - DNA, 60 bp, Artificial Sequence
  Description of Artificial Sequence: targeting sequence/synthetic sequence
gtgctggccaacgccagccggatccactacgacggcggagccggcaccaacaccgtgagc

SEQ ID NO: 5295 - DNA, 60 bp, Artificial Sequence
  Description of Artificial Sequence: targeting sequence/synthetic sequence
cgccacacagagaatgtcaccaagacaaagacacctgaggactatgctgactcgagcatt

SEQ ID NO: 5296 - DNA, 60 bp, Artificial Sequence
  Description of Artificial Sequence: targeting sequence/synthetic sequence
ggtacagcaggccgtgtgtgcaacctgacttcccggggcatggacagctgtgaagtcatg

SEQ ID NO: 5297 - DNA, 60 bp, Artificial Sequence
  Description of Artificial Sequence: targeting sequence/synthetic sequence
ccgacaaccaactcaacaaccaattcagccaccaaaataacagctaataccactgatgaa

SEQ ID NO: 5298 - DNA, 60 bp, Artificial Sequence
  Description of Artificial Sequence: targeting sequence/synthetic sequence
aagatcaaagagaaatacattgatcaggaagaactaaacaagaccaagcctatttggacc

SEQ ID NO: 5299 - DNA, 60 bp, Artificial Sequence
  Description of Artificial Sequence: targeting sequence/synthetic sequence
gaccaggaggtgatcaacaaggccagcaacagcaacaagatccggctggagaagggccgg

SEQ ID NO: 5300 - DNA, 60 bp, Artificial Sequence
  Description of Artificial Sequence: targeting sequence/synthetic sequence
tccctgccagcaacactaccacagtgtcaggcagcgaacaagacctgccccaccaattac

SEQ ID NO: 5301 - DNA, 60 bp, Artificial Sequence
  Description of Artificial Sequence: targeting sequence/synthetic sequence
cgcccggccagccgggccaacaccgtgaggagcttccaccacgaagaacatctggagaac

SEQ ID NO: 5302 - DNA, 60 bp, Artificial Sequence
  Description of Artificial Sequence: targeting sequence/synthetic sequence
ttcaacgacatggccaacgccgctaagggcctggagtgggtgagcaacaagatcagcaag

SEQ ID NO: 5303 - DNA, 60 bp, Artificial Sequence
  Description of Artificial Sequence: targeting sequence/synthetic sequence
acttctggattgttggagacaaacttcactgcctcagccagaactactggctctgggctt

SEQ ID NO: 5304 - DNA, 60 bp, Artificial Sequence
  Description of Artificial Sequence: targeting sequence/synthetic sequence
gacgtggtggagaaaaccaataagattaaagacaggtattgggattctggtcccagagct

SEQ ID NO: 5305 - DNA, 60 bp, Artificial Sequence
  Description of Artificial Sequence: targeting sequence/synthetic sequence
accatcaccacaaacgagatccggaacaagctgagctacagcttcgacggcgccggcgga

SEQ ID NO: 5306 - DNA, 60 bp, Artificial Sequence
  Description of Artificial Sequence: targeting sequence/synthetic sequence
aacttgtcgctgcccaatagcacggcccaagcactcttggccgcccgtgtggacccgccc

SEQ ID NO: 5307 - DNA, 60 bp, Artificial Sequence
  Description of Artificial Sequence: targeting sequence/synthetic sequence
ggctccctgggcacgcagggccgcctctgcaacaagacctcggagggcatggatggctgt

SEQ ID NO: 5308 - DNA, 60 bp, Artificial Sequence
  Description of Artificial Sequence: targeting sequence/synthetic sequence
atcaccacaaacgagatccggaacaagctgagctacagcttcgacggcgccggcggaacc

SEQ ID NO: 5309 - DNA, 60 bp, Artificial Sequence
  Description of Artificial Sequence: targeting sequence/synthetic sequence
gctgccggctacgatgtagaaaaaaacaacagccgtatcaagcttggcctcaagagcttg

SEQ ID NO: 5310 - DNA, 60 bp, Artificial Sequence
  Description of Artificial Sequence: targeting sequence/synthetic sequence
gcggctgccggctacgatgtagaaaaaaacaacagccgtatcaagcttggcctcaagagc

SEQ ID NO: 5311 - DNA, 60 bp, Artificial Sequence
  Description of Artificial Sequence: targeting sequence/synthetic sequence
accatcccccagatcagcaaccggaccctgaacaccctggtgcaggacaacagctacgtg

SEQ ID NO: 5312 - DNA, 60 bp, Artificial Sequence
  Description of Artificial Sequence: targeting sequence/synthetic sequence
aacagacaaagcagcacatctgtcattgaaacaaataaaacatcggtggagctttctttg

SEQ ID NO: 5313 - DNA, 60 bp, Artificial Sequence
  Description of Artificial Sequence: targeting sequence/synthetic sequence
acgcaaaacttgtcgctgcccaatagcacggcccaagcactcttggccgcccgtgtggac

SEQ ID NO: 5314 - DNA, 60 bp, Artificial Sequence
  Description of Artificial Sequence: targeting sequence/synthetic sequence
cttgagtatcctgagcgcccggccagccgggccaacaccgtgaggagcttccaccacgaa

SEQ ID NO: 5315 - DNA, 60 bp, Artificial Sequence
  Description of Artificial Sequence: targeting sequence/synthetic sequence
gctgagatcctggagctggcgggcaatgcggcccgcgacaacaagaagacgcgaatcatc

SEQ ID NO: 5316 - DNA, 60 bp, Artificial Sequence
  Description of Artificial Sequence: targeting sequence/synthetic sequence
ggttatttggatcgcaacctggagaaaaacagcaccaagcaggagatcctggctgctctt

SEQ ID NO: 5317 - DNA, 60 bp, Artificial Sequence
  Description of Artificial Sequence: targeting sequence/synthetic sequence
ccaggtgaccccaccagcaatgcaacctcccggggtgctgaaggccccctgccccctccc

SEQ ID NO: 5318 - DNA, 60 bp, Artificial Sequence
  Description of Artificial Sequence: targeting sequence/synthetic sequence
ggctcccacgggacacaagacaggcagtgcaacaagacatccaacggaagcgacagctgc

SEQ ID NO: 5319 - DNA, 60 bp, Artificial Sequence
  Description of Artificial Sequence: targeting sequence/synthetic sequence
acaagagataatgcaaacaggattataaagacaacattgcaacaagaaaagccagatttc

SEQ ID NO: 5320 - DNA, 60 bp, Artificial Sequence
  Description of Artificial Sequence: targeting sequence/synthetic sequence
gacgatcaggaggtgatcaacaaggccagcaacagcaacaagatccggctggagaagggc

SEQ ID NO: 5321 - DNA, 60 bp, Artificial Sequence
  Description of Artificial Sequence: targeting sequence/synthetic sequence
tccctgggtacagcaggccgtgtgtgcaacctgacttcccggggcatggacagctgtgaa

SEQ ID NO: 5322 - DNA, 60 bp, Artificial Sequence
  Description of Artificial Sequence: targeting sequence/synthetic sequence
gatgaggtcacctggctggttcgccacacagagaatgtcaccaagacaaagacacctgag

SEQ ID NO: 5323 - DNA, 60 bp, Artificial Sequence
  Description of Artificial Sequence: targeting sequence/synthetic sequence
ctgggtacagcaggccgtgtgtgcaacctgacttcccggggcatggacagctgtgaagtc

SEQ ID NO: 5324 - DNA, 60 bp, Artificial Sequence
  Description of Artificial Sequence: targeting sequence/synthetic sequence
aagagccatgtccagctgcaaaattattcaaaggtggaaaggcatcctgtgactgcattg

SEQ ID NO: 5325 - DNA, 60 bp, Artificial Sequence
  Description of Artificial Sequence: targeting sequence/synthetic sequence
cacgggacacaagacaggcagtgcaacaagacatccaacggaagcgacagctgcgacctt

SEQ ID NO: 5326 - DNA, 60 bp, Artificial Sequence
  Description of Artificial Sequence: targeting sequence/synthetic sequence
accggcggcggcagggcgagagcattaaatgaaagcaaaagagttaataatggcaacacg

SEQ ID NO: 5327 - DNA, 60 bp, Artificial Sequence
  Description of Artificial Sequence: targeting sequence/synthetic sequence
gagaacgtggacttccgcatccacgtggagaaccagacgcgggctcgggacgatgtgagc

SEQ ID NO: 5328 - DNA, 60 bp, Artificial Sequence
  Description of Artificial Sequence: targeting sequence/synthetic sequence
aacgacatggccaacgccgctaagggcctggagtgggtgagcaacaagatcagcaagttc

SEQ ID NO: 5329 - DNA, 60 bp, Artificial Sequence
  Description of Artificial Sequence: targeting sequence/synthetic sequence
gccagccgggccaacaccgtgaggagcttccaccacgaagaacatctggagaacatccca

SEQ ID NO: 5330 - DNA, 60 bp, Artificial Sequence
  Description of Artificial Sequence: targeting sequence/synthetic sequence
cgtgtgactaataatgtaaaagacgtcactaaattggtggcaaatcttccaaaagactac

SEQ ID NO: 5331 - DNA, 60 bp, Artificial Sequence
  Description of Artificial Sequence: targeting sequence/synthetic sequence
aagtcagagaacttggtgaagagccatgtccagctgcaaaattattcaaaggtggaaagg

SEQ ID NO: 5332 - DNA, 60 bp, Artificial Sequence
  Description of Artificial Sequence: targeting sequence/synthetic sequence
cctgagcgcccggccagccgggccaacaccgtgaggagcttccaccacgaagaacatctg

SEQ ID NO: 5333 - DNA, 60 bp, Artificial Sequence
  Description of Artificial Sequence: targeting sequence/synthetic sequence
ctggccaacgccagccggatccactacgacggcggagccggcaccaacaccgtgagctac

SEQ ID NO: 5334 - DNA, 60 bp, Artificial Sequence
  Description of Artificial Sequence: targeting sequence/synthetic sequence
ggttcctttggcacaagggaccggacttgcaatgtcacctcccacggcatcgatggctgc

SEQ ID NO: 5335 - DNA, 60 bp, Artificial Sequence
  Description of Artificial Sequence: targeting sequence/synthetic sequence
tgcactgctgcccaccccgagttgaagaccccactaaccgccaacatcacaaaatccgga

SEQ ID NO: 5336 - DNA, 60 bp, Artificial Sequence
  Description of Artificial Sequence: targeting sequence/synthetic sequence
tacattgatcaggaagaactaaacaagaccaagcctatttggaccagaaaccctgatgac

SEQ ID NO: 5337 - DNA, 60 bp, Artificial Sequence
  Description of Artificial Sequence: targeting sequence/synthetic sequence
aacctgccaggtgaccccaccagcaatgcaacctcccggggtgctgaaggccccctgccc

SEQ ID NO: 5338 - DNA, 60 bp, Artificial Sequence
  Description of Artificial Sequence: targeting sequence/synthetic sequence
cacagcgacgccgtgttcaccgacaactacaccgccctgcggaagcagatggccgtgaag

SEQ ID NO: 5339 - DNA, 60 bp, Artificial Sequence
  Description of Artificial Sequence: targeting sequence/synthetic sequence
gacgccgtgctgggcaacagcaccgccgtgaaccggggcgacagctccatcgacctgacc

SEQ ID NO: 5340 - DNA, 60 bp, Artificial Sequence
  Description of Artificial Sequence: targeting sequence/synthetic sequence
aagaagctggtgggttatttggatcgcaacctggagaaaaacagcaccaagcaggagatc

SEQ ID NO: 5341 - DNA, 60 bp, Artificial Sequence
  Description of Artificial Sequence: targeting sequence/synthetic sequence
accaaactcatgcagaattcaaccaaagcgcctctcaagagatcaaatgttgagaaggtg

SEQ ID NO: 5342 - DNA, 60 bp, Artificial Sequence
  Description of Artificial Sequence: targeting sequence/synthetic sequence
gtgaagagccatgtccagctgcaaaattattcaaaggtggaaaggcatcctgtgactgca

SEQ ID NO: 5343 - DNA, 60 bp, Artificial Sequence
  Description of Artificial Sequence: targeting sequence/synthetic sequence
gccgtgctgggcaacagcaccgccgtgaaccggggcgacagctccatcgacctgaccgtg

SEQ ID NO: 5344 - DNA, 60 bp, Artificial Sequence
  Description of Artificial Sequence: targeting sequence/synthetic sequence
ggcaagtccatagatgataattccacaaagtctgagaaacaaacccctagggaacactcg

SEQ ID NO: 5345 - DNA, 60 bp, Artificial Sequence
  Description of Artificial Sequence: targeting sequence/synthetic sequence
ctgccaggtgaccccaccagcaatgcaacctcccggggtgctgaaggccccctgccccct

SEQ ID NO: 5346 - DNA, 60 bp, Artificial Sequence
  Description of Artificial Sequence: targeting sequence/synthetic sequence
gtgctcgccctgtacaacagcacccgcgaccgggtggccggggagagtgcagaaccggag

SEQ ID NO: 5347 - DNA, 60 bp, Artificial Sequence
  Description of Artificial Sequence: targeting sequence/synthetic sequence
atcagcaaccgggtgcgggtgagcatccagaccggcaccgccttccagcccgacgccgct

SEQ ID NO: 5348 - DNA, 60 bp, Artificial Sequence
  Description of Artificial Sequence: targeting sequence/synthetic sequence
aacaggacttctggattgttggagacaaacttcactgcctcagccagaactactggctct

SEQ ID NO: 5349 - DNA, 60 bp, Artificial Sequence
  Description of Artificial Sequence: targeting sequence/synthetic sequence
caggaagaactaaacaagaccaagcctatttggaccagaaaccctgatgacatcacccaa

SEQ ID NO: 5350 - DNA, 60 bp, Artificial Sequence
  Description of Artificial Sequence: targeting sequence/synthetic sequence
tcctttggcacaagggaccggacttgcaatgtcacctcccacggcatcgatggctgcgat

SEQ ID NO: 5351 - DNA, 60 bp, Artificial Sequence
  Description of Artificial Sequence: targeting sequence/synthetic sequence
agcacatctgtcattgaaacaaataaaacatcggtggagctttctttgcctttcgatgaa

SEQ ID NO: 5352 - DNA, 60 bp, Artificial Sequence
  Description of Artificial Sequence: targeting sequence/synthetic sequence
cccagcaccgacgccgtgctgggcaacagcaccgccgtgaaccggggcgacagctccatc

SEQ ID NO: 5353 - DNA, 60 bp, Artificial Sequence
  Description of Artificial Sequence: targeting sequence/synthetic sequence
gccaccttgaactcggttctcaattccaacgctatcaagaacctgcccccaccgctgggc

SEQ ID NO: 5354 - DNA, 60 bp, Artificial Sequence
  Description of Artificial Sequence: targeting sequence/synthetic sequence
ccgatgttgacctgccccgaggcaaacgcgaccaaggtatgcggtagtgacggggtgacc

SEQ ID NO: 5355 - DNA, 60 bp, Artificial Sequence
  Description of Artificial Sequence: targeting sequence/synthetic sequence
gacgccgtgttcaccgacaactacaccgccctgcggaagcagatggccgtgaagaaatac

SEQ ID NO: 5356 - DNA, 60 bp, Artificial Sequence
  Description of Artificial Sequence: targeting sequence/synthetic sequence
aaacgcagaaatggacctgaattttccaatgacatcaagaaaaggaaggtggatgataag

SEQ ID NO: 5357 - DNA, 60 bp, Artificial Sequence
  Description of Artificial Sequence: targeting sequence/synthetic sequence
tctggattgttggagacaaacttcactgcctcagccagaactactggctctgggcttctg

SEQ ID NO: 5358 - DNA, 60 bp, Artificial Sequence
  Description of Artificial Sequence: targeting sequence/synthetic sequence
gccgcaggctacgacgtggagaagaacaacagccgcattaagctgggcattaagagcctg

SEQ ID NO: 5359 - DNA, 60 bp, Artificial Sequence
  Description of Artificial Sequence: targeting sequence/synthetic sequence
ggtgaccccaccagcaatgcaacctcccggggtgctgaaggccccctgccccctcccagc

SEQ ID NO: 5360 - DNA, 60 bp, Artificial Sequence
  Description of Artificial Sequence: targeting sequence/synthetic sequence
cccgaggccgtgctcgccctgtacaacagcacccgcgaccgggtggccggggagagtgca

SEQ ID NO: 5361 - DNA, 60 bp, Artificial Sequence
  Description of Artificial Sequence: targeting sequence/synthetic sequence
gacaggctactgagcacccttttcaacacgaccaccatctctaaagtggcccctggcgag

SEQ ID NO: 5362 - DNA, 60 bp, Artificial Sequence
  Description of Artificial Sequence: targeting sequence/synthetic sequence
tcaggcaagtccatagatgataattccacaaagtctgagaaacaaacccctagggaacac

SEQ ID NO: 5363 - DNA, 60 bp, Artificial Sequence
  Description of Artificial Sequence: targeting sequence/synthetic sequence
aagatcgtggtcaagaacgccaccaagagcaacgtgaacaatgccgtgaacaccctggtg

SEQ ID NO: 5364 - DNA, 60 bp, Artificial Sequence
  Description of Artificial Sequence: targeting sequence/synthetic sequence
ggcccgctgcccgaggccgtgctcgccctgtacaacagcacccgcgaccgggtggccggg

SEQ ID NO: 5365 - DNA, 60 bp, Artificial Sequence
  Description of Artificial Sequence: targeting sequence/synthetic sequence
agccgggccaacaccgtgaggagcttccaccacgaagaacatctggagaacatcccaggg

SEQ ID NO: 5366 - DNA, 60 bp, Artificial Sequence
  Description of Artificial Sequence: targeting sequence/synthetic sequence
aggctactgagcacccttttcaacacgaccaccatctctaaagtggcccctggcgaggac

SEQ ID NO: 5367 - DNA, 60 bp, Artificial Sequence
  Description of Artificial Sequence: targeting sequence/synthetic sequence
agcaccggcggcggcagggcgagagcattaaatgaaagcaaaagagttaataatggcaac

SEQ ID NO: 5368 - DNA, 60 bp, Artificial Sequence
  Description of Artificial Sequence: targeting sequence/synthetic sequence
tataagatccgaatggacatagacgtggtggagaaaaccaataagattaaagacaggtat

SEQ ID NO: 5369 - DNA, 60 bp, Artificial Sequence
  Description of Artificial Sequence: targeting sequence/synthetic sequence
aacatgaccaaggccaccgtcaactaccgccaggagaagacacacatgatgagcgccgtg

SEQ ID NO: 5370 - DNA, 60 bp, Artificial Sequence
  Description of Artificial Sequence: targeting sequence/synthetic sequence
ggcggcagggcgagagcattaaatgaaagcaaaagagttaataatggcaacacggctcca

SEQ ID NO: 5371 - DNA, 60 bp, Artificial Sequence
  Description of Artificial Sequence: targeting sequence/synthetic sequence
ttcgagaccaacagctccaacatcagcctgcggaacaattacatgcccagcaaccaccgg

SEQ ID NO: 5372 - DNA, 60 bp, Artificial Sequence
  Description of Artificial Sequence: targeting sequence/synthetic sequence
attcgtgatgaggtcacctggctggttcgccacacagagaatgtcaccaagacaaagaca

SEQ ID NO: 5373 - DNA, 60 bp, Artificial Sequence
  Description of Artificial Sequence: targeting sequence/synthetic sequence
agcgtgggcacgcagggccgtctctgcaaccgcacgtcgcccggcgcggacggctgtgac

SEQ ID NO: 5374 - DNA, 60 bp, Artificial Sequence
  Description of Artificial Sequence: targeting sequence/synthetic sequence
cgctctggggccagtgccagtggtgtctacaccatccaggtgtccaatgcaacgaagccc

SEQ ID NO: 5375 - DNA, 60 bp, Artificial Sequence
  Description of Artificial Sequence: targeting sequence/synthetic sequence
ctgttcgagaccaacagctccaacatcagcctgcggaacaattacatgcccagcaaccac

SEQ ID NO: 5376 - DNA, 60 bp, Artificial Sequence
  Description of Artificial Sequence: targeting sequence/synthetic sequence
gctgcgattcccagtgccctggacaccaacagctcgaagagcacctcctccttcccctgc

SEQ ID NO: 5377 - DNA, 60 bp, Artificial Sequence
  Description of Artificial Sequence: targeting sequence/synthetic sequence
ccggtgaacatgaccaaggccaccgtcaactaccgccaggagaagacacacatgatgagc

SEQ ID NO: 5378 - DNA, 60 bp, Artificial Sequence
  Description of Artificial Sequence: targeting sequence/synthetic sequence
ttccgcatccacgtggagaaccagacgcgggctcgggacgatgtgagccgtaagcagctg

SEQ ID NO: 5379 - DNA, 60 bp, Artificial Sequence
  Description of Artificial Sequence: targeting sequence/synthetic sequence
gcaacactaccacagtgtcaggcagcgaacaagacctgccccaccaattacatgtggaat

SEQ ID NO: 5380 - DNA, 60 bp, Artificial Sequence
  Description of Artificial Sequence: targeting sequence/synthetic sequence
tacatcagcaaccgggtgcgggtgagcatccagaccggcaccgccttccagcccgacgcc

SEQ ID NO: 5381 - DNA, 60 bp, Artificial Sequence
  Description of Artificial Sequence: targeting sequence/synthetic sequence
gcccagatccgcaagctgaccgacatggaggctcagctcctgaaccagacatcaagaatg

SEQ ID NO: 5382 - DNA, 60 bp, Artificial Sequence
  Description of Artificial Sequence: targeting sequence/synthetic sequence
agagataatgcaaacaggattataaagacaacattgcaacaagaaaagccagatttctgc

SEQ ID NO: 5383 - DNA, 60 bp, Artificial Sequence
  Description of Artificial Sequence: targeting sequence/synthetic sequence
gagctggagaacaacaagaccatgaaccgggcggagaacggagggcggcctccccaccac

SEQ ID NO: 5384 - DNA, 60 bp, Artificial Sequence
  Description of Artificial Sequence: targeting sequence/synthetic sequence
tctggggccagtgccagtggtgtctacaccatccaggtgtccaatgcaacgaagcccagg

SEQ ID NO: 5385 - DNA, 60 bp, Artificial Sequence
  Description of Artificial Sequence: targeting sequence/synthetic sequence
tccccaaattacaacccccagagcagaagtgtgcctccttcagcctcccatgtggcaccc

SEQ ID NO: 5386 - DNA, 60 bp, Artificial Sequence
  Description of Artificial Sequence: targeting sequence/synthetic sequence
ttcaactggtacgtggatggcgtggaggtgcataatgccaagacaaagccgcgggaggag

SEQ ID NO: 5387 - DNA, 60 bp, Artificial Sequence
  Description of Artificial Sequence: targeting sequence/synthetic sequence
aactggtacgtggatggcgtggaggtgcataatgccaagacaaagccgcgggaggagcag

SEQ ID NO: 5388 - DNA, 60 bp, Artificial Sequence
  Description of Artificial Sequence: targeting sequence/synthetic sequence
aactggtacgtggacggcgtggaggtgcataatgccaagacaaagccacgggaggagcag

SEQ ID NO: 5389 - DNA, 60 bp, Artificial Sequence
  Description of Artificial Sequence: targeting sequence/synthetic sequence
tacgccgacagcttcgtgatccggggcgacgaggtgcggcagatcgcccccggccagacc

SEQ ID NO: 5390 - DNA, 60 bp, Artificial Sequence
  Description of Artificial Sequence: targeting sequence/synthetic sequence
agctccgacagcatcggcgtgctgggctaccagaagaccgtggaccacaccaaggtgaac

SEQ ID NO: 5391 - DNA, 60 bp, Artificial Sequence
  Description of Artificial Sequence: targeting sequence/synthetic sequence
gagatcagctccgacagcatcggcgtgctgggctaccagaagaccgtggaccacaccaag

SEQ ID NO: 5392 - DNA, 60 bp, Artificial Sequence
  Description of Artificial Sequence: targeting sequence/synthetic sequence
aatggtgaccgcatcgactccctgctggagaacgaccggcagcagacgcacatgctggat

SEQ ID NO: 5393 - DNA, 60 bp, Artificial Sequence
  Description of Artificial Sequence: targeting sequence/synthetic sequence
gcccgggacaccaacctgcacacccaggagggcgtgctgacccagaaccccgtggagaac

SEQ ID NO: 5394 - DNA, 60 bp, Artificial Sequence
  Description of Artificial Sequence: targeting sequence/synthetic sequence
gcacagctgaagcatcactctgagaataagggcctagacaaagtgatggagactcaagcc

SEQ ID NO: 5395 - DNA, 60 bp, Artificial Sequence
  Description of Artificial Sequence: targeting sequence/synthetic sequence
gccaacctgcctgtcacccagccatttacagtgggtgacaataagacatacaatggctac

SEQ ID NO: 5396 - DNA, 60 bp, Artificial Sequence
  Description of Artificial Sequence: targeting sequence/synthetic sequence
ttagctgcacagctgaagcatcactctgagaataagggcctagacaaagtgatggagact

SEQ ID NO: 5397 - DNA, 60 bp, Artificial Sequence
  Description of Artificial Sequence: targeting sequence/synthetic sequence
cccccagtatctgagcttatcaccaaggcagtggcagcttctaaggagcgcagcggcgtt

SEQ ID NO: 5398 - DNA, 60 bp, Artificial Sequence
  Description of Artificial Sequence: targeting sequence/synthetic sequence
ccttccgtgtcagagctgatcgtgcaggctgcttcctcctctaaggagcgtggtggtgtg

SEQ ID NO: 5399 - DNA, 60 bp, Artificial Sequence
  Description of Artificial Sequence: targeting sequence/synthetic sequence
gtggaggaagggctgctggagcggcacagcaacggctcccagagccagcacagccgtctg

SEQ ID NO: 5400 - DNA, 60 bp, Artificial Sequence
  Description of Artificial Sequence: targeting sequence/synthetic sequence
gtaagcaagggaacgttggtgcagacaaagggtaccggagcctcgggttccttcaagctc

SEQ ID NO: 5401 - DNA, 60 bp, Artificial Sequence
  Description of Artificial Sequence: targeting sequence/synthetic sequence
cggatggcccgggacaccaacctgcacctgcagagcggcgccatcgcccagaaccccgtg

SEQ ID NO: 5402 - DNA, 60 bp, Artificial Sequence
  Description of Artificial Sequence: targeting sequence/synthetic sequence
atccgggactaccccaagtgcaagaccgtgcaccatatccagggccagaacccccacgcc

SEQ ID NO: 5403 - DNA, 60 bp, Artificial Sequence
  Description of Artificial Sequence: targeting sequence/synthetic sequence
ctgctccccggcaagaccggcaagaaaggccacgccagcgacctgaccagccccgacaag

SEQ ID NO: 5404 - DNA, 60 bp, Artificial Sequence
  Description of Artificial Sequence: targeting sequence/synthetic sequence
tcctctaccagcacgatgccaaactccagccagtcctctcactccagctctgggacactg

SEQ ID NO: 5405 - DNA, 60 bp, Artificial Sequence
  Description of Artificial Sequence: targeting sequence/synthetic sequence
agcatggtgtacagcaagagccagatcgaggccgctctgaacgtgaacagcaagatcctg

SEQ ID NO: 5406 - DNA, 60 bp, Artificial Sequence
  Description of Artificial Sequence: targeting sequence/synthetic sequence
gtgtacagcaagagccagatcagctccgccctgaacgtgaacgccaaggtgctggagaac

SEQ ID NO: 5407 - DNA, 60 bp, Artificial Sequence
  Description of Artificial Sequence: targeting sequence/synthetic sequence
aagaccggcaagaaaggccacgccagcgacctgaccagccccgacaagatccagaccatc

SEQ ID NO: 5408 - DNA, 60 bp, Artificial Sequence
  Description of Artificial Sequence: targeting sequence/synthetic sequence
atgaatggtgaccgcatcgactccctgctggagaacgaccggcagcagacgcacatgctg

SEQ ID NO: 5409 - DNA, 60 bp, Artificial Sequence
  Description of Artificial Sequence: targeting sequence/synthetic sequence
ggcgtggaggaagggctgctggagcggcacagcaacggctcccagagccagcacagccgt

SEQ ID NO: 5410 - DNA, 60 bp, Artificial Sequence
  Description of Artificial Sequence: targeting sequence/synthetic sequence
atgagctgcctacgggatgcagaaccacccagtcctacccctgcaggcccccctcggtgc

SEQ ID NO: 5411 - DNA, 60 bp, Artificial Sequence
  Description of Artificial Sequence: targeting sequence/synthetic sequence
aatgcccatagtgctccttccttaggaatggtttcaaatgggagcacattattaaatcat

SEQ ID NO: 5412 - DNA, 60 bp, Artificial Sequence
  Description of Artificial Sequence: targeting sequence/synthetic sequence
accggagcctcgggttccttcaagctcaacaagaaggcgtcctccgtggaaaccaagccc

SEQ ID NO: 5413 - DNA, 60 bp, Artificial Sequence
  Description of Artificial Sequence: targeting sequence/synthetic sequence
ctgctccccggcaagaccggcaagaaaggccacgtgagcgacctgaccgcccccgacaag

SEQ ID NO: 5414 - DNA, 60 bp, Artificial Sequence
  Description of Artificial Sequence: targeting sequence/synthetic sequence
gctgctgagttgaagcctgccaacctgcctgtcacccagccatttacagtgggtgacaat

SEQ ID NO: 5415 - DNA, 60 bp, Artificial Sequence
  Description of Artificial Sequence: targeting sequence/synthetic sequence
gtggtcaaggaggcccaccgggaggtgatcaacagctccaccgagggcctgctcctgaac

SEQ ID NO: 5416 - DNA, 60 bp, Artificial Sequence
  Description of Artificial Sequence: targeting sequence/synthetic sequence
gagttacaagttatttcacttgagtccggagatgcaagtattcatgatacagtagaaaat

SEQ ID NO: 5417 - DNA, 60 bp, Artificial Sequence
  Description of Artificial Sequence: targeting sequence/synthetic sequence
gagatccgccgttatcagaagtcgactgagctgctcatccgcaaactgccatttcagcgc

SEQ ID NO: 5418 - DNA, 60 bp, Artificial Sequence
  Description of Artificial Sequence: targeting sequence/synthetic sequence
agtgctccttccttaggaatggtttcaaatgggagcacattattaaatcatacatcagac

SEQ ID NO: 5419 - DNA, 60 bp, Artificial Sequence
  Description of Artificial Sequence: targeting sequence/synthetic sequence
ttcctgaccacagccggcgccgctatgggcgccgctagcctgaccctgagcgcccagagc

SEQ ID NO: 5420 - DNA, 60 bp, Artificial Sequence
  Description of Artificial Sequence: targeting sequence/synthetic sequence
tcctcccccgcagcttctctgggcagccaaggaagtggcttggagcagagcagtttccag

SEQ ID NO: 5421 - DNA, 60 bp, Artificial Sequence
  Description of Artificial Sequence: targeting sequence/synthetic sequence
gtgtacagcaagagccagatcgaggccgctctgaacgtgaacagcaagatcctggacggc

SEQ ID NO: 5422 - DNA, 60 bp, Artificial Sequence
  Description of Artificial Sequence: targeting sequence/synthetic sequence
aacctctgtgctattcacgccaagcgtgtcactattatgcctaaggacatccagcttgcg

SEQ ID NO: 5423 - DNA, 60 bp, Artificial Sequence
  Description of Artificial Sequence: targeting sequence/synthetic sequence
cccgtggaggaaagcgtggagcgggccatggtgcgggtggccgacaccgtgagctccaag

SEQ ID NO: 5424 - DNA, 60 bp, Artificial Sequence
  Description of Artificial Sequence: targeting sequence/synthetic sequence
cctgccaacctgcctgtcacccagccatttacagtgggtgacaataagacatacaatggc

SEQ ID NO: 5425 - DNA, 60 bp, Artificial Sequence
  Description of Artificial Sequence: targeting sequence/synthetic sequence
attgcacatggctatgtggagcactcggttcgctaccagtgtaagaactactacaaactg

SEQ ID NO: 5426 - DNA, 60 bp, Artificial Sequence
  Description of Artificial Sequence: targeting sequence/synthetic sequence
gttcaagagaaaccatttactgttgagatctcccctggaccccggattgctgctcagatt

SEQ ID NO: 5427 - DNA, 60 bp, Artificial Sequence
  Description of Artificial Sequence: targeting sequence/synthetic sequence
gagtacgcctgcaagcggctgtacagcgaccggggctggggcaacggctgcggcctgttc

SEQ ID NO: 5428 - DNA, 60 bp, Artificial Sequence
  Description of Artificial Sequence: targeting sequence/synthetic sequence
cgggccgtgggcatgggcgccagcttcctgggcttcctgggcgccgctggcagcaccatg

SEQ ID NO: 5429 - DNA, 60 bp, Artificial Sequence
  Description of Artificial Sequence: targeting sequence/synthetic sequence
gatggcaccagcaccctcagagaaaatagcaaaccggaagaaagccatttgctagccaaa

SEQ ID NO: 5430 - DNA, 60 bp, Artificial Sequence
  Description of Artificial Sequence: targeting sequence/synthetic sequence
cagggccccgtggaggaaagcgtggagcgggccatggtgcgggtggccgacaccgtgagc

SEQ ID NO: 5431 - DNA, 60 bp, Artificial Sequence
  Description of Artificial Sequence: targeting sequence/synthetic sequence
ttacaagttatttcacttgagtccggagatgcaagtattcatgatacagtagaaaatctg

SEQ ID NO: 5432 - DNA, 60 bp, Artificial Sequence
  Description of Artificial Sequence: targeting sequence/synthetic sequence
gactaccccaagtgcaagaccatccaccatatccagggccagaacccccacgcccagggc

SEQ ID NO: 5433 - DNA, 60 bp, Artificial Sequence
  Description of Artificial Sequence: targeting sequence/synthetic sequence
tcggaaccagcaaaggagccagccaagaaatcaaggaaacatgctgcctcagatgttgat

SEQ ID NO: 5434 - DNA, 60 bp, Artificial Sequence
  Description of Artificial Sequence: targeting sequence/synthetic sequence
ctgctcgccatggccggcagcgccatgggcgccaccagcctgaccctgagcgcccagagc

SEQ ID NO: 5435 - DNA, 60 bp, Artificial Sequence
  Description of Artificial Sequence: targeting sequence/synthetic sequence
ttctacgcacgcgtctgcagaagtggctcaggcctggttggccgccagcttgaggagttc

SEQ ID NO: 5436 - DNA, 60 bp, Artificial Sequence
  Description of Artificial Sequence: targeting sequence/synthetic sequence
agggagatccagacggccgtgcgcctgctgcttcccggggagctggccaagcacgctgtg

SEQ ID NO: 5437 - DNA, 60 bp, Artificial Sequence
  Description of Artificial Sequence: targeting sequence/synthetic sequence
catgaagaggagcttgttgcaagaaggaaacttcctactgctttagatggctttagcttg

SEQ ID NO: 5438 - DNA, 60 bp, Artificial Sequence
  Description of Artificial Sequence: targeting sequence/synthetic sequence
tatgtggaccccagccccgactactgcctgcgcaacgagagcacgggctccctgggcacg

SEQ ID NO: 5439 - DNA, 60 bp, Artificial Sequence
  Description of Artificial Sequence: targeting sequence/synthetic sequence
aagttccccagcgtgtacgcctgggagcggaagaaaatcagcaactgcgtggccgactac

SEQ ID NO: 5440 - DNA, 60 bp, Artificial Sequence
  Description of Artificial Sequence: targeting sequence/synthetic sequence
aagacggtcaccgccatggacgtggtctacgcgctcaagcgccagggccgcaccctctat

SEQ ID NO: 5441 - DNA, 60 bp, Artificial Sequence
  Description of Artificial Sequence: targeting sequence/synthetic sequence
ctgtgcaaggacgccagcgacatcctgcagaccggcaccatccagggcgaccgggtggcc

SEQ ID NO: 5442 - DNA, 60 bp, Artificial Sequence
  Description of Artificial Sequence: targeting sequence/synthetic sequence
gcctctaaagagcgtagcggagtttctctggctgctctgaaaaaagcgttggctgccgcc

SEQ ID NO: 5443 - DNA, 60 bp, Artificial Sequence
  Description of Artificial Sequence: targeting sequence/synthetic sequence
gagagctcccagaagaccacaatcgacaagatcagcgacgtgagcaccatcgtgccctac

SEQ ID NO: 5444 - DNA, 60 bp, Artificial Sequence
  Description of Artificial Sequence: targeting sequence/synthetic sequence
gtgtgcaaggaccacctggccagcaccgaccagctgaagagcgtgggcctgaacctggag

SEQ ID NO: 5445 - DNA, 60 bp, Artificial Sequence
  Description of Artificial Sequence: targeting sequence/synthetic sequence
gccggcagcaccatgggcgccagcatgaccctgaccgtgcaggcccggctgctcctgagc

SEQ ID NO: 5446 - DNA, 60 bp, Artificial Sequence
  Description of Artificial Sequence: targeting sequence/synthetic sequence
gctgagttgaagcctgccaacctgcctgtcacccagccatttacagtgggtgacaataag

SEQ ID NO: 5447 - DNA, 60 bp, Artificial Sequence
  Description of Artificial Sequence: targeting sequence/synthetic sequence
gtcctgcaccaggactggctgaatggcaaggagtacaagtgcaaggtctccaacaaagcc

SEQ ID NO: 5448 - DNA, 60 bp, Artificial Sequence
  Description of Artificial Sequence: targeting sequence/synthetic sequence
ctgaacggcaacggcgaccccaacaatatggaccgggccgtgaagctgtaccggaagctg

SEQ ID NO: 5449 - DNA, 60 bp, Artificial Sequence
  Description of Artificial Sequence: targeting sequence/synthetic sequence
ctcgagctgaacgccttccgcaggaagcatgattgtgccctggtcatctcgggagactcc

SEQ ID NO: 5450 - DNA, 60 bp, Artificial Sequence
  Description of Artificial Sequence: targeting sequence/synthetic sequence
ttcgaagacaccaatctgtgcgctattcacgctaaacgcgtcaccatcatgcccaaagat

SEQ ID NO: 5451 - DNA, 60 bp, Artificial Sequence
  Description of Artificial Sequence: targeting sequence/synthetic sequence
ttcgaagacacgaacctgtgcgccatccacgccaagcgcgtgaccattatgcccaaggac

SEQ ID NO: 5452 - DNA, 60 bp, Artificial Sequence
  Description of Artificial Sequence: targeting sequence/synthetic sequence
ctggagcccctggtgcccaccggcagcgagaacctgaagagcctgtacaacaccacatgc

SEQ ID NO: 5453 - DNA, 60 bp, Artificial Sequence
  Description of Artificial Sequence: targeting sequence/synthetic sequence
ctcaccgtcgtgcaccaggactggctgaacggcaaggagtacaagtgcaaggtctccaac

SEQ ID NO: 5454 - DNA, 60 bp, Artificial Sequence
  Description of Artificial Sequence: targeting sequence/synthetic sequence
gaaccagcaaaggagccagccaagaaatcaaggaaacatgctgcctcagatgttgatctg

SEQ ID NO: 5455 - DNA, 60 bp, Artificial Sequence
  Description of Artificial Sequence: targeting sequence/synthetic sequence
tcgcctggggcctcagtgagggtctcctgcaagacctctggttacgcctttcacacctat

SEQ ID NO: 5456 - DNA, 60 bp, Artificial Sequence
  Description of Artificial Sequence: targeting sequence/synthetic sequence
attgtaaaccgatttgactatgcacagtgcaagaaactgaacatggatcaggtactagac

SEQ ID NO: 5457 - DNA, 60 bp, Artificial Sequence
  Description of Artificial Sequence: targeting sequence/synthetic sequence
ggcctgctcgccatggccggcagcgccatgggcgccaccagcctgaccctgagcgcccag

SEQ ID NO: 5458 - DNA, 60 bp, Artificial Sequence
  Description of Artificial Sequence: targeting sequence/synthetic sequence
ggctgccagaagatcctgaccgtgctggaccccatggtgcccaccggcagcgagaacctg

SEQ ID NO: 5459 - DNA, 60 bp, Artificial Sequence
  Description of Artificial Sequence: targeting sequence/synthetic sequence
gagattgcacatggctatgtggagcactcggttcgctaccagtgtaagaactactacaaa

SEQ ID NO: 5460 - DNA, 60 bp, Artificial Sequence
  Description of Artificial Sequence: targeting sequence/synthetic sequence
ccccgctatatgagctgcctacgggatgcagaaccacccagtcctacccctgcaggcccc

SEQ ID NO: 5461 - DNA, 60 bp, Artificial Sequence
  Description of Artificial Sequence: targeting sequence/synthetic sequence
ggagcctcgggttccttcaagctcaacaagaaggcgtcctccgtggaaaccaagcccggc

SEQ ID NO: 5462 - DNA, 60 bp, Artificial Sequence
  Description of Artificial Sequence: targeting sequence/synthetic sequence
gaccacgcctgcaagcggacctacagcgaccggggctggggcaacggctgcggcctgttc

SEQ ID NO: 5463 - DNA, 60 bp, Artificial Sequence
  Description of Artificial Sequence: targeting sequence/synthetic sequence
tacgcgagaggatctggggcttccacttcgaatgcatgtacgctgtcagccatcagtaca

SEQ ID NO: 5464 - DNA, 60 bp, Artificial Sequence
  Description of Artificial Sequence: targeting sequence/synthetic sequence
ctccacggggtcccacagggggcacttctagaggacaacagggaacaggaatgtgaaatc

SEQ ID NO: 5465 - DNA, 60 bp, Artificial Sequence
  Description of Artificial Sequence: targeting sequence/synthetic sequence
cgcgtctgcagaagtggctcaggcctggttggccgccagcttgaggagttcctgaaccag

SEQ ID NO: 5466 - DNA, 60 bp, Artificial Sequence
  Description of Artificial Sequence: targeting sequence/synthetic sequence
ctctttgaggacacaaacctttgcgccatccatgctaagcgagtgactattatgcccaaa

SEQ ID NO: 5467 - DNA, 60 bp, Artificial Sequence
  Description of Artificial Sequence: targeting sequence/synthetic sequence
gcttctaaggagcgcaatggcctttctttggcagcccttaagaaggccttagcggccggt

SEQ ID NO: 5468 - DNA, 60 bp, Artificial Sequence
  Description of Artificial Sequence: targeting sequence/synthetic sequence
agcgaggaaatcaacgagaaggacctgcggaagaaaagcgagctgcagggcaccgccctg

SEQ ID NO: 5469 - DNA, 60 bp, Artificial Sequence
  Description of Artificial Sequence: targeting sequence/synthetic sequence
cccggcaccgtggccctgcgcgagatccgccgctaccagaagtcgaccgagctgctaatc

SEQ ID NO: 5470 - DNA, 60 bp, Artificial Sequence
  Description of Artificial Sequence: targeting sequence/synthetic sequence
ctggtgtgcaaggaccacctggccagcaccgaccagctgaagagcgtgggcctgaacctg

SEQ ID NO: 5471 - DNA, 60 bp, Artificial Sequence
  Description of Artificial Sequence: targeting sequence/synthetic sequence
taccaggaagtcctcagcttcaagcccccagagccaccgaagccacctggcagcctggag

SEQ ID NO: 5472 - DNA, 60 bp, Artificial Sequence
  Description of Artificial Sequence: targeting sequence/synthetic sequence
ccaattgtaaaccgatttgactatgcacagtgcaagaaactgaacatggatcaggtacta

SEQ ID NO: 5473 - DNA, 60 bp, Artificial Sequence
  Description of Artificial Sequence: targeting sequence/synthetic sequence
gaagttcatgaagaggagcttgttgcaagaaggaaacttcctactgctttagatggcttt

SEQ ID NO: 5474 - DNA, 60 bp, Artificial Sequence
  Description of Artificial Sequence: targeting sequence/synthetic sequence
accattcagcatctcaagtccaaatttggagatggctatatcgtcacaatgaagatcaaa

SEQ ID NO: 5475 - DNA, 60 bp, Artificial Sequence
  Description of Artificial Sequence: targeting sequence/synthetic sequence
ggcaccattcagcatctcaagtccaaatttggagatggctatatcgtcacaatgaagatc

SEQ ID NO: 5476 - DNA, 60 bp, Artificial Sequence
  Description of Artificial Sequence: targeting sequence/synthetic sequence
cctgccattcggcgtctagctcggcgtggcggcgttaagcggatctctggcctcatttac

SEQ ID NO: 5477 - DNA, 60 bp, Artificial Sequence
  Description of Artificial Sequence: targeting sequence/synthetic sequence
gacagctccctgctcaacagcacccccggcaccggccggcccatgcccggcctggtgcag

SEQ ID NO: 5478 - DNA, 60 bp, Artificial Sequence
  Description of Artificial Sequence: targeting sequence/synthetic sequence
gtggagaagaacaacagccgcattaagctgggcattaagagcctggtaagcaagggaacg

SEQ ID NO: 5479 - DNA, 60 bp, Artificial Sequence
  Description of Artificial Sequence: targeting sequence/synthetic sequence
ggcaagaaaaagtacaagctgaagcacctggtgtgggccagccgggagctggagcggttc

SEQ ID NO: 5480 - DNA, 60 bp, Artificial Sequence
  Description of Artificial Sequence: targeting sequence/synthetic sequence
gccgacagctccctgctcaacagcacccccggcaccggccggcccatgcccggcctggtg

SEQ ID NO: 5481 - DNA, 60 bp, Artificial Sequence
  Description of Artificial Sequence: targeting sequence/synthetic sequence
cggatcatgaacgtgcacgaggccgtgaactgcctggagaccctgtggtacacccgggtg

SEQ ID NO: 5482 - DNA, 60 bp, Artificial Sequence
  Description of Artificial Sequence: targeting sequence/synthetic sequence
ctgattcgcaaactgccattccagcgtctagtccgtgagatcgcgcaggacttcaagact

SEQ ID NO: 5483 - DNA, 60 bp, Artificial Sequence
  Description of Artificial Sequence: targeting sequence/synthetic sequence
gaagacaccaacctgtgtgctatccatgccaaacgtgtaacaattatgccaaaagacatc

SEQ ID NO: 5484 - DNA, 60 bp, Artificial Sequence
  Description of Artificial Sequence: targeting sequence/synthetic sequence
ggcacggtggctctgcgcgagatccgccgctaccagaagtcgaccgagctgctgattcgc

SEQ ID NO: 5485 - DNA, 60 bp, Artificial Sequence
  Description of Artificial Sequence: targeting sequence/synthetic sequence
cttcctgtctcccctatctgggaacctcctccagccacaacatcaacaactccagttcta

SEQ ID NO: 5486 - DNA, 60 bp, Artificial Sequence
  Description of Artificial Sequence: targeting sequence/synthetic sequence
ttaattgttcaagagaaaccatttactgttgagatctcccctggaccccggattgctgct

SEQ ID NO: 5487 - DNA, 60 bp, Artificial Sequence
  Description of Artificial Sequence: targeting sequence/synthetic sequence
tgcgagggcttcacctggagcggctgcggcggaaacagcaaccggttcaagaccatcgag

SEQ ID NO: 5488 - DNA, 60 bp, Artificial Sequence
  Description of Artificial Sequence: targeting sequence/synthetic sequence
aagaccacaatcgacaagatcagcgacgtgagcaccatcgtgccctacatcggccccgcc

SEQ ID NO: 5489 - DNA, 60 bp, Artificial Sequence
  Description of Artificial Sequence: targeting sequence/synthetic sequence
aagctgtgcaaggacaccagccacatcctgcagaccgccagcatccagggcgaccgggtg

SEQ ID NO: 5490 - DNA, 60 bp, Artificial Sequence
  Description of Artificial Sequence: targeting sequence/synthetic sequence
accacaccccaggacttccacccccctaccagcctgaagaacggcgacagctcctactat

SEQ ID NO: 5491 - DNA, 60 bp, Artificial Sequence
  Description of Artificial Sequence: targeting sequence/synthetic sequence
cctcaagatggcaccagcaccctcagagaaaatagcaaaccggaagaaagccatttgcta

SEQ ID NO: 5492 - DNA, 60 bp, Artificial Sequence
  Description of Artificial Sequence: targeting sequence/synthetic sequence
ctaatccggaagctaccttttcagcgcttggtacgggagatcgcacaggactttaagacc

SEQ ID NO: 5493 - DNA, 60 bp, Artificial Sequence
  Description of Artificial Sequence: targeting sequence/synthetic sequence
caggaagtggctccccccacacccctcacccctacctcacacacggctaacacctccccc

SEQ ID NO: 5494 - DNA, 60 bp, Artificial Sequence
  Description of Artificial Sequence: targeting sequence/synthetic sequence
tacgtgcagcgggccaaggcttacctggaggaggagtgccctgcgactctgcggaaatac

SEQ ID NO: 5495 - DNA, 60 bp, Artificial Sequence
  Description of Artificial Sequence: targeting sequence/synthetic sequence
ctgctcaagaaactgcagatccccatcgagcccaagaaagacgatatcattcacagcctg

SEQ ID NO: 5496 - DNA, 60 bp, Artificial Sequence
  Description of Artificial Sequence: targeting sequence/synthetic sequence
atccagaaaggctacatgcggatccagcagtttcggaaggcggatggttcctatgcggct

SEQ ID NO: 5497 - DNA, 60 bp, Artificial Sequence
  Description of Artificial Sequence: targeting sequence/synthetic sequence
cgggccaaggcttacctggaggaggagtgccctgcgactctgcggaaatacctgaaatac

SEQ ID NO: 5498 - DNA, 60 bp, Artificial Sequence
  Description of Artificial Sequence: targeting sequence/synthetic sequence
cgcgcgggcctgcagttcccggtgggccgagtgcacagactgctgcgcaaagggaactac

SEQ ID NO: 5499 - DNA, 60 bp, Artificial Sequence
  Description of Artificial Sequence: targeting sequence/synthetic sequence
tcccgtgagatccagacggccgtgcgcctgctgctgcccggcgagctggccaagcacgcc

SEQ ID NO: 5500 - DNA, 60 bp, Artificial Sequence
  Description of Artificial Sequence: targeting sequence/synthetic sequence
gaccagggcagcctgatcgagaccggcgagcggtgcgtgctgaccgtgcccagcaccgac

SEQ ID NO: 5501 - DNA, 60 bp, Artificial Sequence
  Description of Artificial Sequence: targeting sequence/synthetic sequence
gctgacccaaaggagaagtgggtccagaattatatgaaacacctgggccggaaagctcac

SEQ ID NO: 5502 - DNA, 60 bp, Artificial Sequence
  Description of Artificial Sequence: targeting sequence/synthetic sequence
ggcaagaaacactacatgatgaagcacctggtgtgggccagccgggagctggagcggttc

SEQ ID NO: 5503 - DNA, 60 bp, Artificial Sequence
  Description of Artificial Sequence: targeting sequence/synthetic sequence
acggagctgctgatccgcaagctgcccttccagcggctggtacgcgagatcgcgcaggac

SEQ ID NO: 5504 - DNA, 60 bp, Artificial Sequence
  Description of Artificial Sequence: targeting sequence/synthetic sequence
agctcccggagcttctttgaggacctgctcttcgacaaggtgaagctgagcgacgtgggc

SEQ ID NO: 5505 - DNA, 60 bp, Artificial Sequence
  Description of Artificial Sequence: targeting sequence/synthetic sequence
ctgtacagcgaccggggctggggcaacggctgcggcctgttcggcaagggcagcctggtg

SEQ ID NO: 5506 - DNA, 60 bp, Artificial Sequence
  Description of Artificial Sequence: targeting sequence/synthetic sequence
ccacagggggcacttctagaggacaacagggaacaggaatgtgaaatcatcagctttgct

SEQ ID NO: 5507 - DNA, 60 bp, Artificial Sequence
  Description of Artificial Sequence: targeting sequence/synthetic sequence
tcgaccgagctgctcatccggaagctgcccttccagaggttggtgagggagatcgcgcag

SEQ ID NO: 5508 - DNA, 60 bp, Artificial Sequence
  Description of Artificial Sequence: targeting sequence/synthetic sequence
gctggctatgacgtggagaagaacaacagccgcatcaagctgggtctcaagagcctggtg

SEQ ID NO: 5509 - DNA, 60 bp, Artificial Sequence
  Description of Artificial Sequence: targeting sequence/synthetic sequence
atgaactacgccgacatcggctgcagcgtgatcagctgcggcaaggtgttcagcaagatg

SEQ ID NO: 5510 - DNA, 60 bp, Artificial Sequence
  Description of Artificial Sequence: targeting sequence/synthetic sequence
cggggctggggcaacggctgcggcctgttcggcaagggcagcatcgtggcctgcgccaag

SEQ ID NO: 5511 - DNA, 60 bp, Artificial Sequence
  Description of Artificial Sequence: targeting sequence/synthetic sequence
ctgcagagcaagctgctcccccggctgcccggcctgcccttcctgagctgccagcggggc

SEQ ID NO: 5512 - DNA, 60 bp, Artificial Sequence
  Description of Artificial Sequence: targeting sequence/synthetic sequence
gtgaatgtgaacatgcgcgtgggcatccacagcgggcgcgtgcactgcggcgtccttggc

SEQ ID NO: 5513 - DNA, 60 bp, Artificial Sequence
  Description of Artificial Sequence: targeting sequence/synthetic sequence
aacaatatggacaaggccgtgaagctgtacggcaagctgaagcgggagatcaccttccac

SEQ ID NO: 5514 - DNA, 60 bp, Artificial Sequence
  Description of Artificial Sequence: targeting sequence/synthetic sequence
cccgaggtccagttcaagtggtacgtggacggcgtggaggtgcataatgccaagacaaag

SEQ ID NO: 5515 - DNA, 60 bp, Artificial Sequence
  Description of Artificial Sequence: targeting sequence/synthetic sequence
gccctcctggtgctcagctgcaagtcaagctgctctgtgggctgtgatctgcctcaaacc

SEQ ID NO: 5516 - DNA, 60 bp, Artificial Sequence
  Description of Artificial Sequence: targeting sequence/synthetic sequence
ctggttataacctgggagacggtccctgaggaattacagaatggtcgtggctttggttat

SEQ ID NO: 5517 - DNA, 60 bp, Artificial Sequence
  Description of Artificial Sequence: targeting sequence/synthetic sequence
gagctgaacgccttccgcaggaagcatgattgtgccctggtcatctcgggagactccctg

SEQ ID NO: 5518 - DNA, 60 bp, Artificial Sequence
  Description of Artificial Sequence: targeting sequence/synthetic sequence
cagaagagcaccgtggacaagatcgccgacatcagcatcgtggtcccctacatcggcctg

SEQ ID NO: 5519 - DNA, 60 bp, Artificial Sequence
  Description of Artificial Sequence: targeting sequence/synthetic sequence
ctgcgcgagatccgccgctaccaaaagtcgaccgagttgctgattcggaagctgccgttc

SEQ ID NO: 5520 - DNA, 60 bp, Artificial Sequence
  Description of Artificial Sequence: targeting sequence/synthetic sequence
tgcacgccccgctatatgagctgcctacgggatgcagaaccacccagtcctacccctgca

SEQ ID NO: 5521 - DNA, 60 bp, Artificial Sequence
  Description of Artificial Sequence: targeting sequence/synthetic sequence
tacatgcggatccagcagtttcggaaggcggatggttcctatgcggcttggttgtcacgg

SEQ ID NO: 5522 - DNA, 60 bp, Artificial Sequence
  Description of Artificial Sequence: targeting sequence/synthetic sequence
actatccggcgcttggcccggcatggcggtgtcaagcgcatcttgggcctcatttatgag

SEQ ID NO: 5523 - DNA, 60 bp, Artificial Sequence
  Description of Artificial Sequence: targeting sequence/synthetic sequence
agccacgaagaccccgaggtccagttcaagtggtacgtggacggcgtggaggtgcataat

SEQ ID NO: 5524 - DNA, 60 bp, Artificial Sequence
  Description of Artificial Sequence: targeting sequence/synthetic sequence
gaggtgaccggtgtgaatgtgaacatgcgcgtgggcatccacagcgggcgcgtgcactgc

SEQ ID NO: 5525 - DNA, 60 bp, Artificial Sequence
  Description of Artificial Sequence: targeting sequence/synthetic sequence
agctcctcagagagggatggagtcctggccctggataatttccaccgctggttccagccg

SEQ ID NO: 5526 - DNA, 60 bp, Artificial Sequence
  Description of Artificial Sequence: targeting sequence/synthetic sequence
gcgctgcaggaggcgtgcgagtcttacctggtggggctgtttgaggacaccaacctgtgt

SEQ ID NO: 5527 - DNA, 60 bp, Artificial Sequence
  Description of Artificial Sequence: targeting sequence/synthetic sequence
agcatcatgcggggcaagaaactggagccctgcgaccgggtgctgttcagcgtgggcagc

SEQ ID NO: 5528 - DNA, 60 bp, Artificial Sequence
  Description of Artificial Sequence: targeting sequence/synthetic sequence
gtggaaatagacaccaaatcttactggaaggcacttggcatctccccattccatgagcat

SEQ ID NO: 5529 - DNA, 60 bp, Artificial Sequence
  Description of Artificial Sequence: targeting sequence/synthetic sequence
aagctgtacttcgacctgtgcgacctggtgggcgacaactgggacgatcccgagcccgac

SEQ ID NO: 5530 - DNA, 60 bp, Artificial Sequence
  Description of Artificial Sequence: targeting sequence/synthetic sequence
ggtggcatgaagcgcaagctgtccgtggccatcgccttcgtgggcggctctcgcgccatc

SEQ ID NO: 5531 - DNA, 60 bp, Artificial Sequence
  Description of Artificial Sequence: targeting sequence/synthetic sequence
cgggtgatgaacgtgcacgaggccgtgaactgcctggaggccctgtgggacacccagatg

SEQ ID NO: 5532 - DNA, 60 bp, Artificial Sequence
  Description of Artificial Sequence: targeting sequence/synthetic sequence
agcggcggcaacaagcggaagctctccacggccatcgccctcattgggtacccagccttc

SEQ ID NO: 5533 - DNA, 60 bp, Artificial Sequence
  Description of Artificial Sequence: targeting sequence/synthetic sequence
gtcaccgccatggatgtggtctacgcgctcaagcgccagggccgcaccctctacggtttc

SEQ ID NO: 5534 - DNA, 60 bp, Artificial Sequence
  Description of Artificial Sequence: targeting sequence/synthetic sequence
ctgcccttccagaggttggtgagggagatcgcgcaggatttcaaaaccgacctgaggttt

SEQ ID NO: 5535 - DNA, 60 bp, Artificial Sequence
  Description of Artificial Sequence: targeting sequence/synthetic sequence
gcgctgcaggaggccagcgaggcctacctggtggggctgttcgaagacacgaacctgtgc

SEQ ID NO: 5536 - DNA, 60 bp, Artificial Sequence
  Description of Artificial Sequence: targeting sequence/synthetic sequence
gaagatactctaattgagattttggcatcaagaactaacaaagaaatcagagacattaac

SEQ ID NO: 5537 - DNA, 60 bp, Artificial Sequence
  Description of Artificial Sequence: targeting sequence/synthetic sequence
gctgaggtgatgtcgcctggggcctcagtgagggtctcctgcaagacctctggttacgcc

SEQ ID NO: 5538 - DNA, 60 bp, Artificial Sequence
  Description of Artificial Sequence: targeting sequence/synthetic sequence
gtgtgcaacagcaaggacggcggggcctgggggaccgagcagcgggaggctgtctttccc

SEQ ID NO: 5539 - DNA, 60 bp, Artificial Sequence
  Description of Artificial Sequence: targeting sequence/synthetic sequence
gcctcctcctcccccgcagcttctctgggcagccaaggaagtggcttggagcagagcagt

SEQ ID NO: 5540 - DNA, 60 bp, Artificial Sequence
  Description of Artificial Sequence: targeting sequence/synthetic sequence
cccctggtgcccaccggcagcgagaacctgaagagcctgtacaacaccacatgcgtgatc

SEQ ID NO: 5541 - DNA, 60 bp, Artificial Sequence
  Description of Artificial Sequence: targeting sequence/synthetic sequence
cggggcgtgaccaaccggggctggaacaatggctgcggcctgttcggcaagggcgacatc

SEQ ID NO: 5542 - DNA, 60 bp, Artificial Sequence
  Description of Artificial Sequence: targeting sequence/synthetic sequence
cccaaacgtggcctggaggtgaacaagtgtgagatcgccaggttctacaagctgcacgag

SEQ ID NO: 5543 - DNA, 60 bp, Artificial Sequence
  Description of Artificial Sequence: targeting sequence/synthetic sequence
aagaataacagccgcattaagctgggcctcaagagcttggtgagcaagggcaccctggtg

SEQ ID NO: 5544 - DNA, 60 bp, Artificial Sequence
  Description of Artificial Sequence: targeting sequence/synthetic sequence
ggctgccagaagatcattaccgtgctggaccccctggtgcccaccggcagcgagaacctg

SEQ ID NO: 5545 - DNA, 60 bp, Artificial Sequence
  Description of Artificial Sequence: targeting sequence/synthetic sequence
gaggcccggtgcatcagccagagcggctgggtgaacgagaccagccccttcaccgagaag

SEQ ID NO: 5546 - DNA, 60 bp, Artificial Sequence
  Description of Artificial Sequence: targeting sequence/synthetic sequence
tacgaggcccggtgcatcagccagagcggctgggtgaacgagaccagccccttcaccgag

SEQ ID NO: 5547 - DNA, 60 bp, Artificial Sequence
  Description of Artificial Sequence: targeting sequence/synthetic sequence
gagaagagcgaggaaatcaacgagaaggacctgcggaagaaaagcgagctgcagggcacc

SEQ ID NO: 5548 - DNA, 60 bp, Artificial Sequence
  Description of Artificial Sequence: targeting sequence/synthetic sequence
cacctggaggactccccggactactgcctggagaacaaaacgctagggctgctgggcacc

SEQ ID NO: 5549 - DNA, 60 bp, Artificial Sequence
  Description of Artificial Sequence: targeting sequence/synthetic sequence
cagggcagcctgatcgagaccggcgagcggtgcgtgctgaccgtgcccagcaccgacatc

SEQ ID NO: 5550 - DNA, 60 bp, Artificial Sequence
  Description of Artificial Sequence: targeting sequence/synthetic sequence
cgggacgagtgccccaacgaggaatgcgccatcagccacttcgccgtgtgcgacgccgtg

SEQ ID NO: 5551 - DNA, 60 bp, Artificial Sequence
  Description of Artificial Sequence: targeting sequence/synthetic sequence
ttcttcttccttgtccttgctgttttgggtgagacattaatccctcactattctggtcgt

SEQ ID NO: 5552 - DNA, 60 bp, Artificial Sequence
  Description of Artificial Sequence: targeting sequence/synthetic sequence
ttgctgattcggaagctgccgttccagcgcctggtgcgagaaatcgcccaagacttcaag

SEQ ID NO: 5553 - DNA, 60 bp, Artificial Sequence
  Description of Artificial Sequence: targeting sequence/synthetic sequence
tggctgaccagcaagctgttccccaagatgcccggcctgcccttcatcagctgccagaag

SEQ ID NO: 5554 - DNA, 60 bp, Artificial Sequence
  Description of Artificial Sequence: targeting sequence/synthetic sequence
ccccccacacccctcacccctacctcacacacggctaacacctccccccggcctgtctcc

SEQ ID NO: 5555 - DNA, 60 bp, Artificial Sequence
  Description of Artificial Sequence: targeting sequence/synthetic sequence
gccgacgagagcgtggtcaaggaggcccaccgggaggtgatcaacagctccaccgagggc

SEQ ID NO: 5556 - DNA, 60 bp, Artificial Sequence
  Description of Artificial Sequence: targeting sequence/synthetic sequence
tacatgcccaaacgtggcctggaggtgaacaagtgtgagatcgccaggttctacaagctg

SEQ ID NO: 5557 - DNA, 60 bp, Artificial Sequence
  Description of Artificial Sequence: targeting sequence/synthetic sequence
tgcaacagcaaggacggcggggcctgggggaccgagcagcgggaggctgtctttcccttc

SEQ ID NO: 5558 - DNA, 60 bp, Artificial Sequence
  Description of Artificial Sequence: targeting sequence/synthetic sequence
tacagcgaccggggctggggcaacggctgcggcctgttcggcaagggcagcatcgtggcc

SEQ ID NO: 5559 - DNA, 60 bp, Artificial Sequence
  Description of Artificial Sequence: targeting sequence/synthetic sequence
acccaagttctgcgggaggctgaggagcaccaggagacccagtgcctcagggtgcagcgg

SEQ ID NO: 5560 - DNA, 60 bp, Artificial Sequence
  Description of Artificial Sequence: targeting sequence/synthetic sequence
agccccgactactgcctgcgcaacgagagcacgggctccctgggcacgcagggccgcctc

SEQ ID NO: 5561 - DNA, 60 bp, Artificial Sequence
  Description of Artificial Sequence: targeting sequence/synthetic sequence
ctgtacttcgacctgtgcgacctggtgggcgacaactgggacgatcccgagcccgacatc

SEQ ID NO: 5562 - DNA, 60 bp, Artificial Sequence
  Description of Artificial Sequence: targeting sequence/synthetic sequence
ggccggggcctgctcaagaaactgcagatccccatcgagcccaagaaagacgatatcatt

SEQ ID NO: 5563 - DNA, 60 bp, Artificial Sequence
  Description of Artificial Sequence: targeting sequence/synthetic sequence
ggcgccgacgagagcgtggtcaaggaggcccaccgggaggtgatcaacagctccaccgag

SEQ ID NO: 5564 - DNA, 60 bp, Artificial Sequence
  Description of Artificial Sequence: targeting sequence/synthetic sequence
caagttctgcgggaggctgaggagcaccaggagacccagtgcctcagggtgcagcgggct

SEQ ID NO: 5565 - DNA, 60 bp, Artificial Sequence
  Description of Artificial Sequence: targeting sequence/synthetic sequence
acttaccaggaagtcctcagcttcaagcccccagagccaccgaagccacctggcagcctg

SEQ ID NO: 5566 - DNA, 60 bp, Artificial Sequence
  Description of Artificial Sequence: targeting sequence/synthetic sequence
ataacctgggagacggtccctgaggaattacagaatggtcgtggctttggttatgtggtg

SEQ ID NO: 5567 - DNA, 60 bp, Artificial Sequence
  Description of Artificial Sequence: targeting sequence/synthetic sequence
gccgtgggcatgctgggcgccatgttcctgggcttcctgggcgccgctggcagcaccatg

SEQ ID NO: 5568 - DNA, 60 bp, Artificial Sequence
  Description of Artificial Sequence: targeting sequence/synthetic sequence
cccttcctgttcagcggctgcggcggaaacgccaaccggttccagaccatcggcgagtgc

SEQ ID NO: 5569 - DNA, 60 bp, Artificial Sequence
  Description of Artificial Sequence: targeting sequence/synthetic sequence
cagcatggagagccaagcctacagcgggtcccagtagccaagatggtgtgtgggccctca

SEQ ID NO: 5570 - DNA, 60 bp, Artificial Sequence
  Description of Artificial Sequence: targeting sequence/synthetic sequence
aaccggagagacgagtgccccaacgaggaatgcgccatcagccacttcgccgtgtgcgac

SEQ ID NO: 5571 - DNA, 60 bp, Artificial Sequence
  Description of Artificial Sequence: targeting sequence/synthetic sequence
ccctctaccggcggggtgaagaagcctcatcgctacaggcccgggaccgtggcgcttcga

SEQ ID NO: 5572 - DNA, 60 bp, Artificial Sequence
  Description of Artificial Sequence: targeting sequence/synthetic sequence
ctggagcccgccctgaagaccggcagcgaggacctgaagagcctgtggaacgccatcgcc

SEQ ID NO: 5573 - DNA, 60 bp, Artificial Sequence
  Description of Artificial Sequence: targeting sequence/synthetic sequence
acccgctcttctcgtgccggtctccagttccccgtgggccgagtgcaccgactgctccgc

SEQ ID NO: 5574 - DNA, 60 bp, Artificial Sequence
  Description of Artificial Sequence: targeting sequence/synthetic sequence
gttgccgccttcttcttccttgtccttgctgttttgggtgagacattaatccctcactat

SEQ ID NO: 5575 - DNA, 60 bp, Artificial Sequence
  Description of Artificial Sequence: targeting sequence/synthetic sequence
atcggcaccaaccccagcgacttcgacccccctgccagcctgaagaacggcagctccgcc

SEQ ID NO: 5576 - DNA, 60 bp, Artificial Sequence
  Description of Artificial Sequence: targeting sequence/synthetic sequence
aagagcctgttcaacaccgtggccaccctgtactgcgtgcaccagaagatcgagatcaag

SEQ ID NO: 5577 - DNA, 60 bp, Artificial Sequence
  Description of Artificial Sequence: targeting sequence/synthetic sequence
aagagcctgttcaacaccgtggccaccctgtactgcgtgcaccagcggatcgaggtgaag

SEQ ID NO: 5578 - DNA, 60 bp, Artificial Sequence
  Description of Artificial Sequence: targeting sequence/synthetic sequence
gacatgggcaagatcgtgtacagctgggtgattcgaagggactcgaaaatccccgggacc

SEQ ID NO: 5579 - DNA, 60 bp, Artificial Sequence
  Description of Artificial Sequence: targeting sequence/synthetic sequence
gggatatacaaagtggaaatagacaccaaatcttactggaaggcacttggcatctcccca

SEQ ID NO: 5580 - DNA, 60 bp, Artificial Sequence
  Description of Artificial Sequence: targeting sequence/synthetic sequence
ctggcccccctggtgcccaccggcagcgagaacctgaagagcctgttcaacaccgtgtgc

SEQ ID NO: 5581 - DNA, 60 bp, Artificial Sequence
  Description of Artificial Sequence: targeting sequence/synthetic sequence
cagaacccacagcatggagagccaagcctacagcgggtcccagtagccaagatggtgtgt

SEQ ID NO: 5582 - DNA, 60 bp, Artificial Sequence
  Description of Artificial Sequence: targeting sequence/synthetic sequence
ctgctccgggtgatgaactacgccgacatcggctgcagcgtgatcagctgcggcaaggtg

SEQ ID NO: 5583 - DNA, 60 bp, Artificial Sequence
  Description of Artificial Sequence: targeting sequence/synthetic sequence
gctagcgaagcgtacctggtgggtctgttggaagatactaacctgtgtgccatccacgct

SEQ ID NO: 5584 - DNA, 60 bp, Artificial Sequence
  Description of Artificial Sequence: targeting sequence/synthetic sequence
ctctttaagaagctgaacttcaagcggctgggagctggcatgctggagccgcccttcaag

SEQ ID NO: 5585 - DNA, 60 bp, Artificial Sequence
  Description of Artificial Sequence: targeting sequence/synthetic sequence
ggtggcgtgaagaagccccaccgctacaggcctggtactgtcgccctccgtgaaatccgc

SEQ ID NO: 5586 - DNA, 60 bp, Artificial Sequence
  Description of Artificial Sequence: targeting sequence/synthetic sequence
ggcaaccactgcggcttctttggcaagggcagcatcgtggcctgcgccaagttcgagtgc

SEQ ID NO: 5587 - DNA, 60 bp, Artificial Sequence
  Description of Artificial Sequence: targeting sequence/synthetic sequence
tgcggcagctccagccggagcttctttgaggacctgctcttcgacaaggtgaagctgagc

SEQ ID NO: 5588 - DNA, 60 bp, Artificial Sequence
  Description of Artificial Sequence: targeting sequence/synthetic sequence
agggatggagtcctggccctggataatttccaccgctggttccagccggccatcccctcc

SEQ ID NO: 5589 - DNA, 60 bp, Artificial Sequence
  Description of Artificial Sequence: targeting sequence/synthetic sequence
ttccccagcgtgtacgcctgggagcggaagaaaatcagcaactgcgtggccgactacagc

SEQ ID NO: 5590 - DNA, 60 bp, Artificial Sequence
  Description of Artificial Sequence: targeting sequence/synthetic sequence
ggcgacagcaacaatatggaccgggccgtgaagctgtaccggaagctgaagcgggagatc

SEQ ID NO: 5591 - DNA, 60 bp, Artificial Sequence
  Description of Artificial Sequence: targeting sequence/synthetic sequence
gcctacgcgagaggatctggggcttccacttcgaatgcatgtacgctgtcagccatcagt

SEQ ID NO: 5592 - DNA, 60 bp, Artificial Sequence
  Description of Artificial Sequence: targeting sequence/synthetic sequence
aaggagatctgtgctgacccaaaggagaagtgggtccagaattatatgaaacacctgggc

SEQ ID NO: 5593 - DNA, 60 bp, Artificial Sequence
  Description of Artificial Sequence: targeting sequence/synthetic sequence
atcatgcggggcaagaaactggagccctgcgaccgggtgctgttcagcgtgggcagcacc

SEQ ID NO: 5594 - DNA, 60 bp, Artificial Sequence
  Description of Artificial Sequence: targeting sequence/synthetic sequence
aaatgcgcagagcccatgagggcccccaaaggcctggcttttgctgagatccaggcccgt

SEQ ID NO: 5595 - DNA, 60 bp, Artificial Sequence
  Description of Artificial Sequence: targeting sequence/synthetic sequence
accaaatgcgcagagcccatgagggcccccaaaggcctggcttttgctgagatccaggcc

SEQ ID NO: 5596 - DNA, 60 bp, Artificial Sequence
  Description of Artificial Sequence: targeting sequence/synthetic sequence
cagacattgtcgggtggcatgaagcgcaagctgtccgtggccatcgccttcgtgggcggc

SEQ ID NO: 5597 - DNA, 60 bp, Artificial Sequence
  Description of Artificial Sequence: targeting sequence/synthetic sequence
aaggagcaccccctctttaagaagctgaacttcaagcggctgggagctggcatgctggag

SEQ ID NO: 5598 - DNA, 60 bp, Artificial Sequence
  Description of Artificial Sequence: targeting sequence/synthetic sequence
cccagcgtgtacgcctgggagcggaagaaaatcagcaactgcgtggccgactacagcgtg

SEQ ID NO: 5599 - DNA, 60 bp, Artificial Sequence
  Description of Artificial Sequence: targeting sequence/synthetic sequence
ccagagccagaggatcaggtggagacccagggaacatcaggagcttcagtgcctccgcat

SEQ ID NO: 5600 - DNA, 60 bp, Artificial Sequence
  Description of Artificial Sequence: targeting sequence/synthetic sequence
ggaactgatgaagatactctaattgagattttggcatcaagaactaacaaagaaatcaga

SEQ ID NO: 5601 - DNA, 60 bp, Artificial Sequence
  Description of Artificial Sequence: targeting sequence/synthetic sequence
gctccccccacacccctcacccctacctcacacacggctaacacctccccccggcctgtc

SEQ ID NO: 5602 - DNA, 60 bp, Artificial Sequence
  Description of Artificial Sequence: targeting sequence/synthetic sequence
ttactgatggccctggtggtgctcagctgcaagtcaagctgctctctggactgtgatctg

SEQ ID NO: 5603 - DNA, 60 bp, Artificial Sequence
  Description of Artificial Sequence: targeting sequence/synthetic sequence
gaactcgtcattacatgggagtcaattccagaagaactgcagaatggggagggatttgga

SEQ ID NO: 5604 - DNA, 60 bp, Artificial Sequence
  Description of Artificial Sequence: targeting sequence/synthetic sequence
gaggatcaggtggagacccagggaacatcaggagcttcagtgcctccgcatcagagcagt

SEQ ID NO: 5605 - DNA, 60 bp, Artificial Sequence
  Description of Artificial Sequence: targeting sequence/synthetic sequence
aacctggacatgggcaagatcgtgtacagctgggtgattcgaagggactcgaaaatcccc

SEQ ID NO: 5606 - DNA, 60 bp, Artificial Sequence
  Description of Artificial Sequence: targeting sequence/synthetic sequence
tacgtggacggcgtggaggtgcataatgccaagacaaagccgcgggaggagcagtacaac

SEQ ID NO: 5607 - DNA, 60 bp, Artificial Sequence
  Description of Artificial Sequence: targeting sequence/synthetic sequence
cagctgcagcccagcctgcagaccggcagcgaggaactgcggagcctgtacaacaccgtg

SEQ ID NO: 5608 - DNA, 60 bp, Artificial Sequence
  Description of Artificial Sequence: targeting sequence/synthetic sequence
atcggccagctgcagcccgccatccagaccggcaccgaggaactgcggagcctgtacaac

SEQ ID NO: 5609 - DNA, 60 bp, Artificial Sequence
  Description of Artificial Sequence: targeting sequence/synthetic sequence
cagatcgccgacagccagcaccagagccaccggcagatggtgaccacaaccaaccccctg

SEQ ID NO: 5610 - DNA, 60 bp, Artificial Sequence
  Description of Artificial Sequence: targeting sequence/synthetic sequence
gccaccctgggcgccgacctggtggacagcaccgacaacaccaagatcaaccggggcatc

SEQ ID NO: 5611 - DNA, 60 bp, Artificial Sequence
  Description of Artificial Sequence: targeting sequence/synthetic sequence
tctgccacggtgtcttctcctgggtctgttcctgaagtccaggacattcagcaaaacaca

SEQ ID NO: 5612 - DNA, 60 bp, Artificial Sequence
  Description of Artificial Sequence: targeting sequence/synthetic sequence
ctcagtgcgggcccgggcacctcggggagccacctggacagatccacagtgtcttccttc

SEQ ID NO: 5613 - DNA, 60 bp, Artificial Sequence
  Description of Artificial Sequence: targeting sequence/synthetic sequence
gccctgatggcctctgggagtggtggccacaacaccatgccctccgggggtaactctgtg

SEQ ID NO: 5614 - DNA, 60 bp, Artificial Sequence
  Description of Artificial Sequence: targeting sequence/synthetic sequence
ggagactgtgggctgggcacacgggagggcactcggactggagctgagtgcaagcaaacc

SEQ ID NO: 5615 - DNA, 60 bp, Artificial Sequence
  Description of Artificial Sequence: targeting sequence/synthetic sequence
ggctccccagcttctggcattcctgtcaaagtttctgccacggtgtcttctcctgggtct

SEQ ID NO: 5616 - DNA, 60 bp, Artificial Sequence
  Description of Artificial Sequence: targeting sequence/synthetic sequence
tccttaacccagagtgacatcagccatattggctccatgagagtggagggcattgtccac

SEQ ID NO: 5617 - DNA, 60 bp, Artificial Sequence
  Description of Artificial Sequence: targeting sequence/synthetic sequence
agcgtgaagaaagtggacgataaggtgaccctgtacaagaccacagccaccgccgacagc

SEQ ID NO: 5618 - DNA, 60 bp, Artificial Sequence
  Description of Artificial Sequence: targeting sequence/synthetic sequence
atcaacatcgccatcgagaagctgaacgaccggatcagccacgacgagcaggccatccgg

SEQ ID NO: 5619 - DNA, 60 bp, Artificial Sequence
  Description of Artificial Sequence: targeting sequence/synthetic sequence
atggtcaccgtctcttcagcctccaccaagggcccatcggtcttccccctggcaccctcc

SEQ ID NO: 5620 - DNA, 60 bp, Artificial Sequence
  Description of Artificial Sequence: targeting sequence/synthetic sequence
aacagagaacaggccaacctcaactcaaggacagaagagactataaaatttgctgcagca

SEQ ID NO: 5621 - DNA, 60 bp, Artificial Sequence
  Description of Artificial Sequence: targeting sequence/synthetic sequence
acgtccatgggtgggacacagcagcaatttgtggagggggtccgcatggaagaaatagtt

SEQ ID NO: 5622 - DNA, 60 bp, Artificial Sequence
  Description of Artificial Sequence: targeting sequence/synthetic sequence
atggtgcgggtggccgacaccgtgcagaccagcgccaccaacagcgagcgggtgcccaac

SEQ ID NO: 5623 - DNA, 60 bp, Artificial Sequence
  Description of Artificial Sequence: targeting sequence/synthetic sequence
agcgtcctgggcacgggcacgggtggcagcggtggcttccacctggcccagcaggcctcg

SEQ ID NO: 5624 - DNA, 60 bp, Artificial Sequence
  Description of Artificial Sequence: targeting sequence/synthetic sequence
cacaccactgaggagaggggtctcaatgtgactctcagctccacaggccggaatgggttc

SEQ ID NO: 5625 - DNA, 60 bp, Artificial Sequence
  Description of Artificial Sequence: targeting sequence/synthetic sequence
tacgtggatggcgtggaggtgcataatgccaagacaaagccgcgggaggagcagttcaac

SEQ ID NO: 5626 - DNA, 60 bp, Artificial Sequence
  Description of Artificial Sequence: targeting sequence/synthetic sequence
aataccatcaccagctttgtggacaggggactggacgatctgtcccacactcctctgcgg

SEQ ID NO: 5627 - DNA, 60 bp, Artificial Sequence
  Description of Artificial Sequence: targeting sequence/synthetic sequence
gagaagatgctggtgctggacgcggagcagcgggtgacggcaggcgaggcgctggcccat

SEQ ID NO: 5628 - DNA, 60 bp, Artificial Sequence
  Description of Artificial Sequence: targeting sequence/synthetic sequence
aacatcgccatcgagaagctgaacgaccggatcacccacgacgagcaggccatccgggac

SEQ ID NO: 5629 - DNA, 60 bp, Artificial Sequence
  Description of Artificial Sequence: targeting sequence/synthetic sequence
actgccctgcaggactccagcaaacgaaagcagctggtcagcgatggcctgctagactct

SEQ ID NO: 5630 - DNA, 60 bp, Artificial Sequence
  Description of Artificial Sequence: targeting sequence/synthetic sequence
ctgctacccggggagctggccaaacacgcggtgtcggagggcaccaaggcggtcagcaag

SEQ ID NO: 5631 - DNA, 60 bp, Artificial Sequence
  Description of Artificial Sequence: targeting sequence/synthetic sequence
cctgtgggagatgcggtgtccaaggttctgcagattgagaaggaaggggccatccataga

SEQ ID NO: 5632 - DNA, 60 bp, Artificial Sequence
  Description of Artificial Sequence: targeting sequence/synthetic sequence
tcaggctccccagcttctggcattcctgtcaaagtttctgccacggtgtcttctcctggg

SEQ ID NO: 5633 - DNA, 60 bp, Artificial Sequence
  Description of Artificial Sequence: targeting sequence/synthetic sequence
ctgctcctgggcggactgaccatgggcggaatcgccgctggcgtgggcaccggcaccaca

SEQ ID NO: 5634 - DNA, 60 bp, Artificial Sequence
  Description of Artificial Sequence: targeting sequence/synthetic sequence
catggaatatacacagatgtaggggagaagggaagccagctggctgcgggacagaaacaa

SEQ ID NO: 5635 - DNA, 60 bp, Artificial Sequence
  Description of Artificial Sequence: targeting sequence/synthetic sequence
cagcatctggaggccctcagtgcgggcccgggcacctcggggagccacctggacagatcc

SEQ ID NO: 5636 - DNA, 60 bp, Artificial Sequence
  Description of Artificial Sequence: targeting sequence/synthetic sequence
cctccaacgtcgggttccgccaccatctacgggcacgacatccgcacggagatggatgag

SEQ ID NO: 5637 - DNA, 60 bp, Artificial Sequence
  Description of Artificial Sequence: targeting sequence/synthetic sequence
gtcctgtctcaggtgcagctgcaggagtcgggcccaggactggtgaagccttcggggacc

SEQ ID NO: 5638 - DNA, 60 bp, Artificial Sequence
  Description of Artificial Sequence: targeting sequence/synthetic sequence
cgtacgtccatgggtgggacacagcagcaatttgtggagggggtccgcatggaagaaata

SEQ ID NO: 5639 - DNA, 60 bp, Artificial Sequence
  Description of Artificial Sequence: targeting sequence/synthetic sequence
tctttgggctataagaaggcagaggatgagatgtcccgggccacgtctgttggagaccag

SEQ ID NO: 5640 - DNA, 60 bp, Artificial Sequence
  Description of Artificial Sequence: targeting sequence/synthetic sequence
ctgcacaaccactacacgcagaagagcctctccctgtctccggagctgcaactggaggag

SEQ ID NO: 5641 - DNA, 60 bp, Artificial Sequence
  Description of Artificial Sequence: targeting sequence/synthetic sequence
gaacaggccaacctcaactcaaggacagaagagactataaaatttgctgcagcacattat

SEQ ID NO: 5642 - DNA, 60 bp, Artificial Sequence
  Description of Artificial Sequence: targeting sequence/synthetic sequence
tgttgcagtgacggcaagaccccaagtttggacgccgagggatcgaattgcccagctacc

SEQ ID NO: 5643 - DNA, 60 bp, Artificial Sequence
  Description of Artificial Sequence: targeting sequence/synthetic sequence
ctcctgctgacatctgccctggccggccagagacaggggactcaggcggaatccaacctg

SEQ ID NO: 5644 - DNA, 60 bp, Artificial Sequence
  Description of Artificial Sequence: targeting sequence/synthetic sequence
gactccagcaaacgaaagcagctggtcagcgatggcctgctagactctgtccccggcgtg

SEQ ID NO: 5645 - DNA, 60 bp, Artificial Sequence
  Description of Artificial Sequence: targeting sequence/synthetic sequence
accgccggcagcgccatgggcgccgctagcctgaccgtgagcgcccagagccggaccctg

SEQ ID NO: 5646 - DNA, 60 bp, Artificial Sequence
  Description of Artificial Sequence: targeting sequence/synthetic sequence
ctgctgacatctgccctggccggccagagacaggggactcaggcggaatccaacctgagt

SEQ ID NO: 5647 - DNA, 60 bp, Artificial Sequence
  Description of Artificial Sequence: targeting sequence/synthetic sequence
agcctgctcgagaagcagatcgagaacctgcgggccgctgacaacgccacccaggagaag

SEQ ID NO: 5648 - DNA, 60 bp, Artificial Sequence
  Description of Artificial Sequence: targeting sequence/synthetic sequence
gctgcgttccagctcacccagggagaccagctatccacccacacagatggcatcccccac

SEQ ID NO: 5649 - DNA, 60 bp, Artificial Sequence
  Description of Artificial Sequence: targeting sequence/synthetic sequence
atgatccagacagcccacgtgggtgtgggaatcagtgggaatgaaggcatgcaggccacc

SEQ ID NO: 5650 - DNA, 60 bp, Artificial Sequence
  Description of Artificial Sequence: targeting sequence/synthetic sequence
aattcagctctagggtgttgcagtgacggcaagaccccaagtttggacgccgagggatcg

SEQ ID NO: 5651 - DNA, 60 bp, Artificial Sequence
  Description of Artificial Sequence: targeting sequence/synthetic sequence
aacctgcccgacaccaaggccagcggccccgcccacagcaaggaggtgcccaccctgacc

SEQ ID NO: 5652 - DNA, 60 bp, Artificial Sequence
  Description of Artificial Sequence: targeting sequence/synthetic sequence
ctgcctggggcccaggggctccctggtgttggcctcacaccttcagctgcccagactgcc

SEQ ID NO: 5653 - DNA, 60 bp, Artificial Sequence
  Description of Artificial Sequence: targeting sequence/synthetic sequence
accctgggcgccgacctggtggacagcaccgacaacaccaagatcaaccggggcatcttc

SEQ ID NO: 5654 - DNA, 60 bp, Artificial Sequence
  Description of Artificial Sequence: targeting sequence/synthetic sequence
tcccgggccacgtctgttggagaccagctggaggcacccgcccgcaccatttacctcaac

SEQ ID NO: 5655 - DNA, 60 bp, Artificial Sequence
  Description of Artificial Sequence: targeting sequence/synthetic sequence
gacatgtaccttctccacatggaagaggagaggaaaaataatagtaacagcagttttgat

SEQ ID NO: 5656 - DNA, 60 bp, Artificial Sequence
  Description of Artificial Sequence: targeting sequence/synthetic sequence
cagctcacccagggagaccagctatccacccacacagatggcatcccccacctagtcctc

SEQ ID NO: 5657 - DNA, 60 bp, Artificial Sequence
  Description of Artificial Sequence: targeting sequence/synthetic sequence
tggattgcctcccacaccactgaggagaggggtctcaatgtgactctcagctccacaggc

SEQ ID NO: 5658 - DNA, 60 bp, Artificial Sequence
  Description of Artificial Sequence: targeting sequence/synthetic sequence
cataataaccagcttctagctggagggctgcatgcagggaaggtcattaaaggtgaagag

SEQ ID NO: 5659 - DNA, 60 bp, Artificial Sequence
  Description of Artificial Sequence: targeting sequence/synthetic sequence
cagcagggcgtcccgcatgggtatgctttttctcaagaagaacacggagctgttagtcag

SEQ ID NO: 5660 - DNA, 60 bp, Artificial Sequence
  Description of Artificial Sequence: targeting sequence/synthetic sequence
gccctggccatcggcgccggcgtggccggcggaatcaccggcagcatgagcctggccagc

SEQ ID NO: 5661 - DNA, 60 bp, Artificial Sequence
  Description of Artificial Sequence: targeting sequence/synthetic sequence
gatcgagtgaaggacctggccactgtgtacgtggatgtgctcaaagacagcggcagagac

SEQ ID NO: 5662 - DNA, 60 bp, Artificial Sequence
  Description of Artificial Sequence: targeting sequence/synthetic sequence
gagcagatcgccgacagccagcaccggagcctgcggcagatggtggccaccacaaacccc

SEQ ID NO: 5663 - DNA, 60 bp, Artificial Sequence
  Description of Artificial Sequence: targeting sequence/synthetic sequence
aagctgaacgaccggatcacccacgacgagcaggccatccgggacctgaccctggagatc

SEQ ID NO: 5664 - DNA, 60 bp, Artificial Sequence
  Description of Artificial Sequence: targeting sequence/synthetic sequence
aataaccagcttctagctggagggctgcatgcagggaaggtcattaaaggtgaagagatc

SEQ ID NO: 5665 - DNA, 60 bp, Artificial Sequence
  Description of Artificial Sequence: targeting sequence/synthetic sequence
ctgttccctccaacgtcgggttccgccaccatctacgggcacgacatccgcacggagatg

SEQ ID NO: 5666 - DNA, 60 bp, Artificial Sequence
  Description of Artificial Sequence: targeting sequence/synthetic sequence
agcctgacttctgactcccagtcggggatcatgctatcatcagtgggtaccagcaaatgc

SEQ ID NO: 5667 - DNA, 60 bp, Artificial Sequence
  Description of Artificial Sequence: targeting sequence/synthetic sequence
acgatgccaaactccagccagtcctctcactccagctctgggacactgagctccttagag

SEQ ID NO: 5668 - DNA, 60 bp, Artificial Sequence
  Description of Artificial Sequence: targeting sequence/synthetic sequence
gcccaggggctccctggtgttggcctcacaccttcagctgcccagactgcccgtcagcac

SEQ ID NO: 5669 - DNA, 60 bp, Artificial Sequence
  Description of Artificial Sequence: targeting sequence/synthetic sequence
cggcagatcctgggccagctgcagcccagcctgcagaccggcagcgaggaactgaagagc

SEQ ID NO: 5670 - DNA, 60 bp, Artificial Sequence
  Description of Artificial Sequence: targeting sequence/synthetic sequence
ctggaggaccagagagtagtgaaagaggaggaagccatagcactcgcagagaaatatgga

SEQ ID NO: 5671 - DNA, 60 bp, Artificial Sequence
  Description of Artificial Sequence: targeting sequence/synthetic sequence
gtcctcactgccctgcaggactccagcaaacgaaagcagctggtcagcgatggcctgcta

SEQ ID NO: 5672 - DNA, 60 bp, Artificial Sequence
  Description of Artificial Sequence: targeting sequence/synthetic sequence
gacctcacaggccgacaagatacctctcgcatgtccacctcacagattcctggtcgggtg

SEQ ID NO: 5673 - DNA, 60 bp, Artificial Sequence
  Description of Artificial Sequence: targeting sequence/synthetic sequence
gtgggtgtgggaatcagtgggaatgaaggcatgcaggccaccaacaactcggattacgcc

SEQ ID NO: 5674 - DNA, 60 bp, Artificial Sequence
  Description of Artificial Sequence: targeting sequence/synthetic sequence
gtgggaatcagtgggaatgaaggcatgcaggccaccaacaactcggattacgccatcgca

SEQ ID NO: 5675 - DNA, 60 bp, Artificial Sequence
  Description of Artificial Sequence: targeting sequence/synthetic sequence
cagagctccctgcagaccggcagcgaggaactgaagagcctgtacaacgccgtggtcgtg

SEQ ID NO: 5676 - DNA, 60 bp, Artificial Sequence
  Description of Artificial Sequence: targeting sequence/synthetic sequence
acttctgactcccagtcggggatcatgctatcatcagtgggtaccagcaaatgcaacagc

SEQ ID NO: 5677 - DNA, 60 bp, Artificial Sequence
  Description of Artificial Sequence: targeting sequence/synthetic sequence
atcgagtggctgaaggtgaagatcctgcccgaggtgaaggagaagcacgagttcctgaac

SEQ ID NO: 5678 - DNA, 60 bp, Artificial Sequence
  Description of Artificial Sequence: targeting sequence/synthetic sequence
ggcggactgaccatgggcggaatcgccgctggcgtgggcaccggcaccacagccctggtg

SEQ ID NO: 5679 - DNA, 60 bp, Artificial Sequence
  Description of Artificial Sequence: targeting sequence/synthetic sequence
gcagcaacaggtgcccagtcccaggttcacctggtgcagtctggggctgaggtgatgtcg

SEQ ID NO: 5680 - DNA, 60 bp, Artificial Sequence
  Description of Artificial Sequence: targeting sequence/synthetic sequence
atcctgggccagctgcagcccgccctgaagaccggcaccgaggacctgcagagcctgtac

SEQ ID NO: 5681 - DNA, 60 bp, Artificial Sequence
  Description of Artificial Sequence: targeting sequence/synthetic sequence
gccatgggccgggtggccgacaccatcgcccggggccccagcaacagcgagcagatcccc

SEQ ID NO: 5682 - DNA, 60 bp, Artificial Sequence
  Description of Artificial Sequence: targeting sequence/synthetic sequence
tcttctttgggctataagaaggcagaggatgagatgtcccgggccacgtctgttggagac

SEQ ID NO: 5683 - DNA, 60 bp, Artificial Sequence
  Description of Artificial Sequence: targeting sequence/synthetic sequence
ctgaccggcgccgtgcagaccctgagccagatcagcgacatcaacgacgagaacctgcag

SEQ ID NO: 5684 - DNA, 60 bp, Artificial Sequence
  Description of Artificial Sequence: targeting sequence/synthetic sequence
gtcaaagtttctgccacggtgtcttctcctgggtctgttcctgaagtccaggacattcag

SEQ ID NO: 5685 - DNA, 60 bp, Artificial Sequence
  Description of Artificial Sequence: targeting sequence/synthetic sequence
cctggtactcccgggcctcaaggtattgctggacagcgtggtgtggtcggcctgcctggt

SEQ ID NO: 5686 - DNA, 60 bp, Artificial Sequence
  Description of Artificial Sequence: targeting sequence/synthetic sequence
gggaccacggtcaccgtctcctcagcatccccgaccagccccaaggtcttcccgctgagc

SEQ ID NO: 5687 - DNA, 60 bp, Artificial Sequence
  Description of Artificial Sequence: targeting sequence/synthetic sequence
ggcttcctgggcgccgctggcagcaccatgggcgccgctgccatcaccctgaccgcccag

SEQ ID NO: 5688 - DNA, 60 bp, Artificial Sequence
  Description of Artificial Sequence: targeting sequence/synthetic sequence
aacctgaccgccaccctgggcgccgacctggtggacagcaccgacaacaccaagatcaac

SEQ ID NO: 5689 - DNA, 60 bp, Artificial Sequence
  Description of Artificial Sequence: targeting sequence/synthetic sequence
cagagcaacctgcccgacaccaaggccagcggccccgcccacagcaaggaggtgcccacc

SEQ ID NO: 5690 - DNA, 60 bp, Artificial Sequence
  Description of Artificial Sequence: targeting sequence/synthetic sequence
ttcctggccaccgccggcagcgccatgggcgccgctagcctgaccgtgagcgcccagagc

SEQ ID NO: 5691 - DNA, 60 bp, Artificial Sequence
  Description of Artificial Sequence: targeting sequence/synthetic sequence
gtgaccagcatgggctccagcatgccaccctctccctctaatgggtccagcttctccctg

SEQ ID NO: 5692 - DNA, 60 bp, Artificial Sequence
  Description of Artificial Sequence: targeting sequence/synthetic sequence
cagctgcagcccgccatccagaccggcaccgaggaactgcggagcctgtacaacaccgtg

SEQ ID NO: 5693 - DNA, 60 bp, Artificial Sequence
  Description of Artificial Sequence: targeting sequence/synthetic sequence
tcgggttccgccaccatctacgggcacgacatccgcacggagatggatgagatccgcaag

SEQ ID NO: 5694 - DNA, 60 bp, Artificial Sequence
  Description of Artificial Sequence: targeting sequence/synthetic sequence
ttggtggcagcagcaacaggtgcccagtcccaggttcacctggtgcagtctggggctgag

SEQ ID NO: 5695 - DNA, 60 bp, Artificial Sequence
  Description of Artificial Sequence: targeting sequence/synthetic sequence
ggaggcactgtcaccaaccccgggggctcggggacctccagccggctggagccgagagaa

SEQ ID NO: 5696 - DNA, 60 bp, Artificial Sequence
  Description of Artificial Sequence: targeting sequence/synthetic sequence
ggcgtcccagtcactgtctcctcggcatccccgaccagccccaaggtcttcccgctgagc

SEQ ID NO: 5697 - DNA, 60 bp, Artificial Sequence
  Description of Artificial Sequence: targeting sequence/synthetic sequence
gaggcccacctggccgaggaaaacgagggcgacaacgcctgcaagcggacctacagcgac

SEQ ID NO: 5698 - DNA, 60 bp, Artificial Sequence
  Description of Artificial Sequence: targeting sequence/synthetic sequence
gaccggatcagccacgacgagcaggccatccgggacctgaccctggagatcgagaacgcc

SEQ ID NO: 5699 - DNA, 60 bp, Artificial Sequence
  Description of Artificial Sequence: targeting sequence/synthetic sequence
gccatggtgcgggtggccgacaccgtgcagaccagcgccaccaacagcgagcgggtgccc

SEQ ID NO: 5700 - DNA, 60 bp, Artificial Sequence
  Description of Artificial Sequence: targeting sequence/synthetic sequence
gccctggccatgggcgccggcgtggccggcggaatcaccggcagcatgagcctggccagc

SEQ ID NO: 5701 - DNA, 60 bp, Artificial Sequence
  Description of Artificial Sequence: targeting sequence/synthetic sequence
gtcctgtcccggctgcagctgcaggagtcgggcccaggcctgctgaagccttcggtgacc

SEQ ID NO: 5702 - DNA, 60 bp, Artificial Sequence
  Description of Artificial Sequence: targeting sequence/synthetic sequence
gtcaacataggcatccacggcagcatctctgccgaagccaaggcctgtgaggagaagaag

SEQ ID NO: 5703 - DNA, 60 bp, Artificial Sequence
  Description of Artificial Sequence: targeting sequence/synthetic sequence
gtcaccaaccccgggggctcggggacctccagccggctggagccgagagaacgcatggag

SEQ ID NO: 5704 - DNA, 60 bp, Artificial Sequence
  Description of Artificial Sequence: targeting sequence/synthetic sequence
tcgtccgacctcacaggccgacaagatacctctcgcatgtccacctcacagattcctggt

SEQ ID NO: 5705 - DNA, 60 bp, Artificial Sequence
  Description of Artificial Sequence: targeting sequence/synthetic sequence
aacccccagagcagaagtgtgcctccttcagcctcccatgtggcacccacagaaacattc

SEQ ID NO: 5706 - DNA, 60 bp, Artificial Sequence
  Description of Artificial Sequence: targeting sequence/synthetic sequence
atcaccagctttgtggacaggggactggacgatctgtcccacactcctctgcggagacag

SEQ ID NO: 5707 - DNA, 60 bp, Artificial Sequence
  Description of Artificial Sequence: targeting sequence/synthetic sequence
acccagatccagcccagcatccagaccggcagcgaggaaatcaagagcctgtacaacacc

SEQ ID NO: 5708 - DNA, 60 bp, Artificial Sequence
  Description of Artificial Sequence: targeting sequence/synthetic sequence
gccgctatcggccgggtggccgacaccgtgggcaccggccccaccaacagcgaggccatc

SEQ ID NO: 5709 - DNA, 60 bp, Artificial Sequence
  Description of Artificial Sequence: targeting sequence/synthetic sequence
cagaaggagacccagagtggagcccagagggagatggggcctgtggcctctgccgacaaa

SEQ ID NO: 5710 - DNA, 60 bp, Artificial Sequence
  Description of Artificial Sequence: targeting sequence/synthetic sequence
acctcacacatggaaagcgaggagttgaatggtgcatacaaggccatccccgttgcccag

SEQ ID NO: 5711 - DNA, 60 bp, Artificial Sequence
  Description of Artificial Sequence: targeting sequence/synthetic sequence
tacagcctgaccggcgccgtgcagaccctgagccagatcagcgacatcaacgacgagcgg

SEQ ID NO: 5712 - DNA, 60 bp, Artificial Sequence
  Description of Artificial Sequence: targeting sequence/synthetic sequence
cctggcctccagggaattaaaggtgatcaaggcgatcacggcgtcccgggagctaaaggt

SEQ ID NO: 5713 - DNA, 60 bp, Artificial Sequence
  Description of Artificial Sequence: targeting sequence/synthetic sequence
cggatcacccacgacgagcaggccatccgggacctgaccctggagatcgagaacgcccgg

SEQ ID NO: 5714 - DNA, 60 bp, Artificial Sequence
  Description of Artificial Sequence: targeting sequence/synthetic sequence
cctcaggaacgtaccctgactttggtagacacaggcattggcatgaccaaagctgatctc

SEQ ID NO: 5715 - DNA, 60 bp, Artificial Sequence
  Description of Artificial Sequence: targeting sequence/synthetic sequence
gtaacggaatcagcatctgtgatgccatcccaggatgtgagtgggtctgaagatacattc

SEQ ID NO: 5716 - DNA, 60 bp, Artificial Sequence
  Description of Artificial Sequence: targeting sequence/synthetic sequence
acaagggtaatggtacccccttccagtatggatgtcactgttggagagagtattgtttta

SEQ ID NO: 5717 - DNA, 60 bp, Artificial Sequence
  Description of Artificial Sequence: targeting sequence/synthetic sequence
cagcttctagctggagggctgcatgcagggaaggtcattaaaggtgaagagatcagcgtg

SEQ ID NO: 5718 - DNA, 60 bp, Artificial Sequence
  Description of Artificial Sequence: targeting sequence/synthetic sequence
caagtcactgcgctccctgtgaacagccctatgaataaaggggataccgaggtgatgaaa

SEQ ID NO: 5719 - DNA, 60 bp, Artificial Sequence
  Description of Artificial Sequence: targeting sequence/synthetic sequence
gacttcaagctgagctccagcggcgacaagatcattgtgaacctgaacaataacatcctg

SEQ ID NO: 5720 - DNA, 60 bp, Artificial Sequence
  Description of Artificial Sequence: targeting sequence/synthetic sequence
cacctggccgaggaaaacgagggcgacaacgcctgcaagcggacctacagcgaccggggc

SEQ ID NO: 5721 - DNA, 60 bp, Artificial Sequence
  Description of Artificial Sequence: targeting sequence/synthetic sequence
ggggccggggaggcccgggccagcaccgggagctcagattcttcccctggtggccatggg

SEQ ID NO: 5722 - DNA, 60 bp, Artificial Sequence
  Description of Artificial Sequence: targeting sequence/synthetic sequence
cccagccaggatgcctccggggacctgtacaccacgagcagccagctgaccctgccggcc

SEQ ID NO: 5723 - DNA, 60 bp, Artificial Sequence
  Description of Artificial Sequence: targeting sequence/synthetic sequence
aaggcagcccctgctccgcaggaggccacagccacattcaacagcacggctgacagagag

SEQ ID NO: 5724 - DNA, 60 bp, Artificial Sequence
  Description of Artificial Sequence: targeting sequence/synthetic sequence
ttgctactgccgggagagctggctaaacatgctgtgtctgagggcaccaaggctgtcact

SEQ ID NO: 5725 - DNA, 60 bp, Artificial Sequence
  Description of Artificial Sequence: targeting sequence/synthetic sequence
cctgctccgcaggaggccacagccacattcaacagcacggctgacagagaggatggccac

SEQ ID NO: 5726 - DNA, 60 bp, Artificial Sequence
  Description of Artificial Sequence: targeting sequence/synthetic sequence
aagactctctccctccctgagctggagcaacagcaggaacagcagcaggagcagcagcag

SEQ ID NO: 5727 - DNA, 60 bp, Artificial Sequence
  Description of Artificial Sequence: targeting sequence/synthetic sequence
gtgctggacgcggagcagcgggtgacggcaggcgaggcgctggcccatccctacttcgag

SEQ ID NO: 5728 - DNA, 60 bp, Artificial Sequence
  Description of Artificial Sequence: targeting sequence/synthetic sequence
ggcataacgggacagtcggggctccctggccttcctggacagcagggggctcctgggatt

SEQ ID NO: 5729 - DNA, 60 bp, Artificial Sequence
  Description of Artificial Sequence: targeting sequence/synthetic sequence
tacaacccccagagcagaagtgtgcctccttcagcctcccatgtggcacccacagaaaca

SEQ ID NO: 5730 - DNA, 60 bp, Artificial Sequence
  Description of Artificial Sequence: targeting sequence/synthetic sequence
accgaggcctgcaacgccgctaagggcctggagtgggtgagcaacaagatcagcaagttc

SEQ ID NO: 5731 - DNA, 60 bp, Artificial Sequence
  Description of Artificial Sequence: targeting sequence/synthetic sequence
tgtctgaagaatggtgctggggatgtggcctttgtcaagcactcgactatatttgagaac

SEQ ID NO: 5732 - DNA, 60 bp, Artificial Sequence
  Description of Artificial Sequence: targeting sequence/synthetic sequence
gagatgtcccgggccacgtctgttggagaccagctggaggcacccgcccgcaccatttac

SEQ ID NO: 5733 - DNA, 60 bp, Artificial Sequence
  Description of Artificial Sequence: targeting sequence/synthetic sequence
gacagccgggagcacatgggcgccgctagcatcaccctgaccgtgcaggcccggcagctg

SEQ ID NO: 5734 - DNA, 60 bp, Artificial Sequence
  Description of Artificial Sequence: targeting sequence/synthetic sequence
gagctggcagaactccgagagtctaccagccagatgcacacagcatcatctttggagaag

SEQ ID NO: 5735 - DNA, 60 bp, Artificial Sequence
  Description of Artificial Sequence: targeting sequence/synthetic sequence
tctaccagcacgatgccaaactccagccagtcctctcactccagctctgggacactgagc

SEQ ID NO: 5736 - DNA, 60 bp, Artificial Sequence
  Description of Artificial Sequence: targeting sequence/synthetic sequence
ctgaccgccaccctgggcgccgacctggtggacagcaccgacaacaccaagatcaaccgg

SEQ ID NO: 5737 - DNA, 60 bp, Artificial Sequence
  Description of Artificial Sequence: targeting sequence/synthetic sequence
agtggagactgtgggctgggcacacgggagggcactcggactggagctgagtgcaagcaa

SEQ ID NO: 5738 - DNA, 60 bp, Artificial Sequence
  Description of Artificial Sequence: targeting sequence/synthetic sequence
gagctgggcgggggccctggtgcaggcagcctgcagcccttggccctggaggggtccctg

SEQ ID NO: 5739 - DNA, 60 bp, Artificial Sequence
  Description of Artificial Sequence: targeting sequence/synthetic sequence
acaatcattaccatgcctacagagtctgattttctaatgcaagtggatggaaaacccaaa

SEQ ID NO: 5740 - DNA, 60 bp, Artificial Sequence
  Description of Artificial Sequence: targeting sequence/synthetic sequence
caggtccaccccgacaccggcatctcctctaaagccatggggatcatgaattcctttgtc

SEQ ID NO: 5741 - DNA, 60 bp, Artificial Sequence
  Description of Artificial Sequence: targeting sequence/synthetic sequence
gacgcccagcaccggagccaccggcagatggccaccacaaccaaccccctgatccggcac

SEQ ID NO: 5742 - DNA, 60 bp, Artificial Sequence
  Description of Artificial Sequence: targeting sequence/synthetic sequence
agtgatctggaggaccagagagtagtgaaagaggaggaagccatagcactcgcagagaaa

SEQ ID NO: 5743 - DNA, 60 bp, Artificial Sequence
  Description of Artificial Sequence: targeting sequence/synthetic sequence
aacggcatcaccggcgagaccacaaccacagagtacagcaacgcccggtacgtgagccag

SEQ ID NO: 5744 - DNA, 60 bp, Artificial Sequence
  Description of Artificial Sequence: targeting sequence/synthetic sequence
aaccccgggggctcggggacctccagccggctggagccgagagaacgcatggagcccacc

SEQ ID NO: 5745 - DNA, 60 bp, Artificial Sequence
  Description of Artificial Sequence: targeting sequence/synthetic sequence
acggccgtgcgcctgctgctgcccggcgagctggccaagcacgccgtgtccgagggcacc

SEQ ID NO: 5746 - DNA, 60 bp, Artificial Sequence
  Description of Artificial Sequence: targeting sequence/synthetic sequence
gagctgaaacgggagccagctgtgggggagcccgctgaggtcacgaccacggtgctggtg

SEQ ID NO: 5747 - DNA, 60 bp, Artificial Sequence
  Description of Artificial Sequence: targeting sequence/synthetic sequence
gaagagctgaatcagctgctaaaaggagtcaccatagccagtgggggtgtgttacccaac

SEQ ID NO: 5748 - DNA, 60 bp, Artificial Sequence
  Description of Artificial Sequence: targeting sequence/synthetic sequence
aacgacttcaagctgagctccagcggcgacaagatcattgtgaacctgaacaataacatc

SEQ ID NO: 5749 - DNA, 60 bp, Artificial Sequence
  Description of Artificial Sequence: targeting sequence/synthetic sequence
aggctggccacatccagtgccagtagtcaatcccacaccttcatatccagtgtggaatca

SEQ ID NO: 5750 - DNA, 60 bp, Artificial Sequence
  Description of Artificial Sequence: targeting sequence/synthetic sequence
ccaacaagggtaatggtacccccttccagtatggatgtcactgttggagagagtattgtt

SEQ ID NO: 5751 - DNA, 60 bp, Artificial Sequence
  Description of Artificial Sequence: targeting sequence/synthetic sequence
ctacagaaggagctggcagaactccgagagtctaccagccagatgcacacagcatcatct

SEQ ID NO: 5752 - DNA, 60 bp, Artificial Sequence
  Description of Artificial Sequence: targeting sequence/synthetic sequence
acatccagtgccagtagtcaatcccacaccttcatatccagtgtggaatcagaatgccac

SEQ ID NO: 5753 - DNA, 60 bp, Artificial Sequence
  Description of Artificial Sequence: targeting sequence/synthetic sequence
gaagggagggctgtggtcctcacatcccacagcatggaagaatgtgaggcactgtgtacc

SEQ ID NO: 5754 - DNA, 60 bp, Artificial Sequence
  Description of Artificial Sequence: targeting sequence/synthetic sequence
gccacgatatatgaacgcgctgggcgagtggaagggagaaacggctcgattactcaaatc

SEQ ID NO: 5755 - DNA, 60 bp, Artificial Sequence
  Description of Artificial Sequence: targeting sequence/synthetic sequence
gtgcctggcatccctggcccacaaggttcacctggcttacctggagacaaaggtgcaaaa

SEQ ID NO: 5756 - DNA, 60 bp, Artificial Sequence
  Description of Artificial Sequence: targeting sequence/synthetic sequence
aaaggggctcaaggactccctggcataacgggacagtcggggctccctggccttcctgga

SEQ ID NO: 5757 - DNA, 60 bp, Artificial Sequence
  Description of Artificial Sequence: targeting sequence/synthetic sequence
agcaacaatcagccccagaacgtggacagcgtgtgcagcggcaccctgcagaagaccgag

SEQ ID NO: 5758 - DNA, 60 bp, Artificial Sequence
  Description of Artificial Sequence: targeting sequence/synthetic sequence
gccctggtggacaccagcggctacaacgccgaggtgcgggtgggcgacaacgtgcagctg

SEQ ID NO: 5759 - DNA, 60 bp, Artificial Sequence
  Description of Artificial Sequence: targeting sequence/synthetic sequence
accgtggacaagcggagcaccacacgggacgccctggacgccggcgtggacggcatcatg

SEQ ID NO: 5760 - DNA, 60 bp, Artificial Sequence
  Description of Artificial Sequence: targeting sequence/synthetic sequence
gatttagccacgatatatgaacgcgctgggcgagtggaagggagaaacggctcgattact

SEQ ID NO: 5761 - DNA, 60 bp, Artificial Sequence
  Description of Artificial Sequence: targeting sequence/synthetic sequence
ggcgtgccccctaaggtggtcaactacgaggccggcgagtgggccgagaactgctacaac

SEQ ID NO: 5762 - DNA, 60 bp, Artificial Sequence
  Description of Artificial Sequence: targeting sequence/synthetic sequence
agcaccatgggcgccgctgccgtgaccctgaccgtgcaggcccggcagctgctccccggc

SEQ ID NO: 5763 - DNA, 60 bp, Artificial Sequence
  Description of Artificial Sequence: targeting sequence/synthetic sequence
gacctgcaggtgggccaggtggagctgggcggaggccccggcgccggcagcctgcagccc

SEQ ID NO: 5764 - DNA, 60 bp, Artificial Sequence
  Description of Artificial Sequence: targeting sequence/synthetic sequence
ccccaggaagattctctcttacatggccaattttcacaagcagtcactcccctagcccat

SEQ ID NO: 5765 - DNA, 60 bp, Artificial Sequence
  Description of Artificial Sequence: targeting sequence/synthetic sequence
tcacacatggaaagcgaggagttgaatggtgcatacaaggccatccccgttgcccaggac

SEQ ID NO: 5766 - DNA, 60 bp, Artificial Sequence
  Description of Artificial Sequence: targeting sequence/synthetic sequence
gagatcgccagcaacatccagccccagaacgtggacagcgtgtgcagcggcaccctgcag

SEQ ID NO: 5767 - DNA, 60 bp, Artificial Sequence
  Description of Artificial Sequence: targeting sequence/synthetic sequence
aacaagggcttcaacatcgagaacagcggccagaacatcgagcggaaccccgccctgcag

SEQ ID NO: 5768 - DNA, 60 bp, Artificial Sequence
  Description of Artificial Sequence: targeting sequence/synthetic sequence
atcaagaaactgagcctgctcgagaagcagatcgagaacctgcgggccgctgacagcgcc

SEQ ID NO: 5769 - DNA, 60 bp, Artificial Sequence
  Description of Artificial Sequence: targeting sequence/synthetic sequence
gagcccctggtgcccaccggcagcgagaacctgaagagcctgtacaacaccacatgcgtg

SEQ ID NO: 5770 - DNA, 60 bp, Artificial Sequence
  Description of Artificial Sequence: targeting sequence/synthetic sequence
cagggactgccaggcccgaaaggccagcaaggtgttacaggattggtgggtatacctgga

SEQ ID NO: 5771 - DNA, 60 bp, Artificial Sequence
  Description of Artificial Sequence: targeting sequence/synthetic sequence
gagcccagccagggcaccaccaccttcgctgtgaccagcatactgcgcgtggcagccgag

SEQ ID NO: 5772 - DNA, 60 bp, Artificial Sequence
  Description of Artificial Sequence: targeting sequence/synthetic sequence
atcgcgcagggtggcgtcctgcccaacatccaggccgtactgctgcccaagaagacggag

SEQ ID NO: 5773 - DNA, 60 bp, Artificial Sequence
  Description of Artificial Sequence: targeting sequence/synthetic sequence
ggccgcaccatccttctgtccacccaccacatggatgaggctgacctgcttggggaccgc

SEQ ID NO: 5774 - DNA, 60 bp, Artificial Sequence
  Description of Artificial Sequence: targeting sequence/synthetic sequence
cacgctacaacggaaacaatcattaccatgcctacagagtctgattttctaatgcaagtg

SEQ ID NO: 5775 - DNA, 60 bp, Artificial Sequence
  Description of Artificial Sequence: targeting sequence/synthetic sequence
accggcgagaccacaaccacagagtacagcaacgcccggtacgtgagccagcaaacccgg

SEQ ID NO: 5776 - DNA, 60 bp, Artificial Sequence
  Description of Artificial Sequence: targeting sequence/synthetic sequence
gtgaagaaagtggacgataaggtgaccctgtacaagaccacagccaccgccgacagcgac

SEQ ID NO: 5777 - DNA, 60 bp, Artificial Sequence
  Description of Artificial Sequence: targeting sequence/synthetic sequence
cccaccagtggagactgtgggctgggcacacgggagggcactcggactggagctgagtgc

SEQ ID NO: 5778 - DNA, 60 bp, Artificial Sequence
  Description of Artificial Sequence: targeting sequence/synthetic sequence
cagacaggtaacatcatgtctcgggtaacagaggacacgtccaccctgagtgattctctg

SEQ ID NO: 5779 - DNA, 60 bp, Artificial Sequence
  Description of Artificial Sequence: targeting sequence/synthetic sequence
aagtgtctgaagaatggtgctggggatgtggcctttgtcaagcactcgactatatttgag

SEQ ID NO: 5780 - DNA, 60 bp, Artificial Sequence
  Description of Artificial Sequence: targeting sequence/synthetic sequence
gtcccgcatgggtatgctttttctcaagaagaacacggagctgttagtcaggaagaagtc

SEQ ID NO: 5781 - DNA, 60 bp, Artificial Sequence
  Description of Artificial Sequence: targeting sequence/synthetic sequence
cgctcaggcagaaccatcatcatgtccactcaccacatggacgaggccgacctccttggg

SEQ ID NO: 5782 - DNA, 60 bp, Artificial Sequence
  Description of Artificial Sequence: targeting sequence/synthetic sequence
ggccaggtggagctgggcggaggccccggcgccggcagcctgcagcccctggccctggag

SEQ ID NO: 5783 - DNA, 60 bp, Artificial Sequence
  Description of Artificial Sequence: targeting sequence/synthetic sequence
cgtaccctgactttggtagacacaggcattggcatgaccaaagctgatctcataaataat

SEQ ID NO: 5784 - DNA, 60 bp, Artificial Sequence
  Description of Artificial Sequence: targeting sequence/synthetic sequence
tggctgaaggagaagatcattcccgccgctaaggagaaggtggagttcctgaacaatctg

SEQ ID NO: 5785 - DNA, 60 bp, Artificial Sequence
  Description of Artificial Sequence: targeting sequence/synthetic sequence
agccaggacaagactctctccctccctgagctggagcaacagcaggaacagcagcaggag

SEQ ID NO: 5786 - DNA, 60 bp, Artificial Sequence
  Description of Artificial Sequence: targeting sequence/synthetic sequence
accgccctgctatcttctggcttttcccttgaggatccccagacccactccaaccgcatc

SEQ ID NO: 5787 - DNA, 60 bp, Artificial Sequence
  Description of Artificial Sequence: targeting sequence/synthetic sequence
aaggacctggccactgtgtacgtggatgtgctcaaagacagcggcagagactatgtgtcc

SEQ ID NO: 5788 - DNA, 60 bp, Artificial Sequence
  Description of Artificial Sequence: targeting sequence/synthetic sequence
gctggagggctgcatgcagggaaggtcattaaaggtgaagagatcagcgtggtccccaat

SEQ ID NO: 5789 - DNA, 60 bp, Artificial Sequence
  Description of Artificial Sequence: targeting sequence/synthetic sequence
accatgggcgcccggagcgtgaccctgaccgtgcaggcccggcagctgatgagcggcatc

SEQ ID NO: 5790 - DNA, 60 bp, Artificial Sequence
  Description of Artificial Sequence: targeting sequence/synthetic sequence
gtggacaagcggagcaccacacgggacgccctggacgccggcgtggacggcatcatgacc

SEQ ID NO: 5791 - DNA, 60 bp, Artificial Sequence
  Description of Artificial Sequence: targeting sequence/synthetic sequence
caggtcaacataggcatccacggcagcatctctgccgaagccaaggcctgtgaggagaag

SEQ ID NO: 5792 - DNA, 60 bp, Artificial Sequence
  Description of Artificial Sequence: targeting sequence/synthetic sequence
gagcatggaatatacacagatgtaggggagaagggaagccagctggctgcgggacagaaa

SEQ ID NO: 5793 - DNA, 60 bp, Artificial Sequence
  Description of Artificial Sequence: targeting sequence/synthetic sequence
atcatcagagaagggagggctgtggtcctcacatcccacagcatggaagaatgtgaggca

SEQ ID NO: 5794 - DNA, 60 bp, Artificial Sequence
  Description of Artificial Sequence: targeting sequence/synthetic sequence
gaagattctctcttacatggccaattttcacaagcagtcactcccctagcccatcatcac

SEQ ID NO: 5795 - DNA, 60 bp, Artificial Sequence
  Description of Artificial Sequence: targeting sequence/synthetic sequence
tccctccctgagctggagcaacagcaggaacagcagcaggagcagcagcaggagcaggtg

SEQ ID NO: 5796 - DNA, 60 bp, Artificial Sequence
  Description of Artificial Sequence: targeting sequence/synthetic sequence
gctacaacggaaacaatcattaccatgcctacagagtctgattttctaatgcaagtggat

SEQ ID NO: 5797 - DNA, 60 bp, Artificial Sequence
  Description of Artificial Sequence: targeting sequence/synthetic sequence
atgatttcccggacccctgaggtcacgtgcgtggtggtggacgtgagccacgaagacccc

SEQ ID NO: 5798 - DNA, 60 bp, Artificial Sequence
  Description of Artificial Sequence: targeting sequence/synthetic sequence
ttcacaaatacaaaggaatccagttctcatcaccctgggatagctgaattcccttcccgt

SEQ ID NO: 5799 - DNA, 60 bp, Artificial Sequence
  Description of Artificial Sequence: targeting sequence/synthetic sequence
gattatcacgctacaacggaaacaatcattaccatgcctacagagtctgattttctaatg

SEQ ID NO: 5800 - DNA, 60 bp, Artificial Sequence
  Description of Artificial Sequence: targeting sequence/synthetic sequence
atgggcgccgctgccgtgaccctgaccgtgcaggcccggcagctgctccccggcatcgtg

SEQ ID NO: 5801 - DNA, 60 bp, Artificial Sequence
  Description of Artificial Sequence: targeting sequence/synthetic sequence
accagcggctacaacgccgaggtgcgggtgggcgacaacgtgcagctgaacaccatctac

SEQ ID NO: 5802 - DNA, 60 bp, Artificial Sequence
  Description of Artificial Sequence: targeting sequence/synthetic sequence
gacatgcaaacacgtgaagttctgatgaagttatctggaactatagagtgtgaagggccc

SEQ ID NO: 5803 - DNA, 60 bp, Artificial Sequence
  Description of Artificial Sequence: targeting sequence/synthetic sequence
accatcgcgcagggcggtgtcctgcccaacatccaggccgtattgctgcctaagaagacg

SEQ ID NO: 5804 - DNA, 60 bp, Artificial Sequence
  Description of Artificial Sequence: targeting sequence/synthetic sequence
ctgcgacagaagaagcccaccatctccgtgaaggaagtctccttctacacagcggcgccc

SEQ ID NO: 5805 - DNA, 60 bp, Artificial Sequence
  Description of Artificial Sequence: targeting sequence/synthetic sequence
ctggataaaggcatcatggcagatccaaccgtcaatgtccctctgctgggaacagtgcct

SEQ ID NO: 5806 - DNA, 60 bp, Artificial Sequence
  Description of Artificial Sequence: targeting sequence/synthetic sequence
ccgggactcaaaggtttgccaggtcttcccggcattcctggcacacccggggagaagggg

SEQ ID NO: 5807 - DNA, 60 bp, Artificial Sequence
  Description of Artificial Sequence: targeting sequence/synthetic sequence
acagaaactaatctccaaactgctcctaaactttctacatctacatccaccactgggaca

SEQ ID NO: 5808 - DNA, 60 bp, Artificial Sequence
  Description of Artificial Sequence: targeting sequence/synthetic sequence
agacatgccctggggggcttcacacacaggggctctgagcccgaggaagaggaggatgtc

SEQ ID NO: 5809 - DNA, 60 bp, Artificial Sequence
  Description of Artificial Sequence: targeting sequence/synthetic sequence
caaacaacagaaactaatctccaaactgctcctaaactttctacatctacatccaccact

SEQ ID NO: 5810 - DNA, 60 bp, Artificial Sequence
  Description of Artificial Sequence: targeting sequence/synthetic sequence
ggcctggtgaccggcatggccgacggcgtggtcgccagcaaccacgccggctacgagcag

SEQ ID NO: 5811 - DNA, 60 bp, Artificial Sequence
  Description of Artificial Sequence: targeting sequence/synthetic sequence
ctggtgaccggcatggccgacggcgtggtcgccagcaaccacgccggctacgagcagttc

SEQ ID NO: 5812 - DNA, 60 bp, Artificial Sequence
  Description of Artificial Sequence: targeting sequence/synthetic sequence
gatgaacagatggagtcaatgacatattctactgaaagaaagaccaactcacttcctctg

SEQ ID NO: 5813 - DNA, 60 bp, Artificial Sequence
  Description of Artificial Sequence: targeting sequence/synthetic sequence
gaggtgggggagatagatgcagatgaagaggtgaagaaggctttgactggtattaagcaa

SEQ ID NO: 5814 - DNA, 60 bp, Artificial Sequence
  Description of Artificial Sequence: targeting sequence/synthetic sequence
ctccacatggaagaggagaggaaaaataatagtaacagcagttttgatgaagagtactta

SEQ ID NO: 5815 - DNA, 60 bp, Artificial Sequence
  Description of Artificial Sequence: targeting sequence/synthetic sequence
atccagacggccgtacgcctgctgctgcccggggagctggctaagcacgccgtgtcagag

SEQ ID NO: 5816 - DNA, 60 bp, Artificial Sequence
  Description of Artificial Sequence: targeting sequence/synthetic sequence
ggtaacatcatgtctcgggtaacagaggacacgtccaccctgagtgattctctgagtgag

SEQ ID NO: 5817 - DNA, 60 bp, Artificial Sequence
  Description of Artificial Sequence: targeting sequence/synthetic sequence
gacctgcttggcaaagaggaggacgaagggagccacgatgagaatgtgagtacttgtgac

SEQ ID NO: 5818 - DNA, 60 bp, Artificial Sequence
  Description of Artificial Sequence: targeting sequence/synthetic sequence
attaaaaaagctgatgaacagatggagtcaatgacatattctactgaaagaaagaccaac

SEQ ID NO: 5819 - DNA, 60 bp, Artificial Sequence
  Description of Artificial Sequence: targeting sequence/synthetic sequence
ttgttcttcctgggattctctgtggtcttcgtggggattgtgttaggaaacctgctcatc

SEQ ID NO: 5820 - DNA, 60 bp, Artificial Sequence
  Description of Artificial Sequence: targeting sequence/synthetic sequence
ggcttcctgaccacagccggcgtggccatgggcaccgccagcctgaccctgagcgcccag

SEQ ID NO: 5821 - DNA, 60 bp, Artificial Sequence
  Description of Artificial Sequence: targeting sequence/synthetic sequence
gaatctggcatcttcacaaatacaaaggaatccagttctcatcaccctgggatagctgaa

SEQ ID NO: 5822 - DNA, 60 bp, Artificial Sequence
  Description of Artificial Sequence: targeting sequence/synthetic sequence
ttagacctgcttggcaaagaggaggacgaagggagccacgatgagaatgtgagtacttgt

SEQ ID NO: 5823 - DNA, 60 bp, Artificial Sequence
  Description of Artificial Sequence: targeting sequence/synthetic sequence
cagacctcggagatcatcacgtttgccgagtcaggaacagccaggaagacgctgcacttc

SEQ ID NO: 5824 - DNA, 60 bp, Artificial Sequence
  Description of Artificial Sequence: targeting sequence/synthetic sequence
gagctaagtagacattggcgcagaggaacgttaagcgtcgacggtgaaacacctgtgctc

SEQ ID NO: 5825 - DNA, 60 bp, Artificial Sequence
  Description of Artificial Sequence: targeting sequence/synthetic sequence
gtcaccatcgcacagggtggcgtcctgcccaacatccaggccgtgctgctgccaaagaaa

SEQ ID NO: 5826 - DNA, 60 bp, Artificial Sequence
  Description of Artificial Sequence: targeting sequence/synthetic sequence
ttcaccgaggcctgcaacgccgctaagggcctggagtggatcagcaacaagatcagcaag

SEQ ID NO: 5827 - DNA, 60 bp, Artificial Sequence
  Description of Artificial Sequence: targeting sequence/synthetic sequence
atcatggcagatccaaccgtcaatgtccctctgctgggaacagtgcctcacaaggcatca

SEQ ID NO: 5828 - DNA, 60 bp, Artificial Sequence
  Description of Artificial Sequence: targeting sequence/synthetic sequence
caggtgcagctgcaagagtcgggcccaggactggtgaagccttcggagaccctgtccctc

SEQ ID NO: 5829 - DNA, 60 bp, Artificial Sequence
  Description of Artificial Sequence: targeting sequence/synthetic sequence
gcctccggggacctgtacaccacgagcagccagctgaccctgccggccacacagtgccca

SEQ ID NO: 5830 - DNA, 60 bp, Artificial Sequence
  Description of Artificial Sequence: targeting sequence/synthetic sequence
acctccagggagatccagacggccgtgcgcctgctgctgccaggggagctggccaagcac

SEQ ID NO: 5831 - DNA, 60 bp, Artificial Sequence
  Description of Artificial Sequence: targeting sequence/synthetic sequence
cccagccagggcaccaccaccttcgctgtgaccagcatactgcgcgtggcagccgaggac

SEQ ID NO: 5832 - DNA, 60 bp, Artificial Sequence
  Description of Artificial Sequence: targeting sequence/synthetic sequence
accaacaagggcttcaacatcgagaacagcggccagaacatcgagcggaaccccgccctg

SEQ ID NO: 5833 - DNA, 60 bp, Artificial Sequence
  Description of Artificial Sequence: targeting sequence/synthetic sequence
ctgcggaagaaagcctgcgacgtgctggagatcccctacgtgatcaagcagggcgacagc

SEQ ID NO: 5834 - DNA, 60 bp, Artificial Sequence
  Description of Artificial Sequence: targeting sequence/synthetic sequence
cagctgcaggagtcgggcccaggactggtgaagccttcggggaccctgtccctcacctgc

SEQ ID NO: 5835 - DNA, 60 bp, Artificial Sequence
  Description of Artificial Sequence: targeting sequence/synthetic sequence
gagaaggagctgaaacgggagccagctgtgggggagcccgctgaggtcacgaccacggtg

SEQ ID NO: 5836 - DNA, 60 bp, Artificial Sequence
  Description of Artificial Sequence: targeting sequence/synthetic sequence
ctcttcgggcttctcctgctgacatctgccctggccggccagagacaggggactcaggcg

SEQ ID NO: 5837 - DNA, 60 bp, Artificial Sequence
  Description of Artificial Sequence: targeting sequence/synthetic sequence
ttcctggccatggccggcagcgccatgggcgccaccagcctgaccctgagcgcccagagc

SEQ ID NO: 5838 - DNA, 60 bp, Artificial Sequence
  Description of Artificial Sequence: targeting sequence/synthetic sequence
gataccaacctgtgtgccatccacgctaagagagtcaccatcatgcccaaagacatccag

SEQ ID NO: 5839 - DNA, 60 bp, Artificial Sequence
  Description of Artificial Sequence: targeting sequence/synthetic sequence
caaacacgtgaagttctgatgaagttatctggaactatagagtgtgaagggcccaaccgc

SEQ ID NO: 5840 - DNA, 60 bp, Artificial Sequence
  Description of Artificial Sequence: targeting sequence/synthetic sequence
ggctgccagcaaatcatgcggcagctgcagcccagcctgcagaccggcaccgaggaaatc

SEQ ID NO: 5841 - DNA, 60 bp, Artificial Sequence
  Description of Artificial Sequence: targeting sequence/synthetic sequence
caccggagccaccggcagatggccaccgccaccaaccccctgatccggcacgagaaccgg

SEQ ID NO: 5842 - DNA, 60 bp, Artificial Sequence
  Description of Artificial Sequence: targeting sequence/synthetic sequence
ttggagctaagtagacattggcgcagaggaacgttaagcgtcgacggtgaaacacctgtg

SEQ ID NO: 5843 - DNA, 60 bp, Artificial Sequence
  Description of Artificial Sequence: targeting sequence/synthetic sequence
tggctgaagaaaaaggcctgcgacctgctcgagatcccccacgtgatgcggcagggcgac

SEQ ID NO: 5844 - DNA, 60 bp, Artificial Sequence
  Description of Artificial Sequence: targeting sequence/synthetic sequence
atcacatcccgtgagatccagacggccgtgcgcctgctgctgcccggcgagctggccaag

SEQ ID NO: 5845 - DNA, 60 bp, Artificial Sequence
  Description of Artificial Sequence: targeting sequence/synthetic sequence
cagaagcggagcctgaccacaagccccgtggacatcagcatcattgacagcgtgaacgac

SEQ ID NO: 5846 - DNA, 60 bp, Artificial Sequence
  Description of Artificial Sequence: targeting sequence/synthetic sequence
ctccctgtgaacagccctatgaataaaggggataccgaggtgatgaaatgcatcgttgag

SEQ ID NO: 5847 - DNA, 60 bp, Artificial Sequence
  Description of Artificial Sequence: targeting sequence/synthetic sequence
tccagtgccagtagtcaatcccacaccttcatatccagtgtggaatcagaatgccacagc

SEQ ID NO: 5848 - DNA, 60 bp, Artificial Sequence
  Description of Artificial Sequence: targeting sequence/synthetic sequence
acctcggagatcatcacgtttgccgagtcaggaacagccaggaagacgctgcacttcgag

SEQ ID NO: 5849 - DNA, 60 bp, Artificial Sequence
  Description of Artificial Sequence: targeting sequence/synthetic sequence
catgccctggggggcttcacacacaggggctctgagcccgaggaagaggaggatgtctcc

SEQ ID NO: 5850 - DNA, 60 bp, Artificial Sequence
  Description of Artificial Sequence: targeting sequence/synthetic sequence
ctgtttgaaaccgccctgctatcttctggcttttcccttgaggatccccagacccactcc

SEQ ID NO: 5851 - DNA, 60 bp, Artificial Sequence
  Description of Artificial Sequence: targeting sequence/synthetic sequence
atcctgctggggctgcgacagaagaagcccaccatctccgtgaaggaagtctccttctac

SEQ ID NO: 5852 - DNA, 60 bp, Artificial Sequence
  Description of Artificial Sequence: targeting sequence/synthetic sequence
agcagttctgatgctggcctgggcagcgaccatgagagtgacacgctgaccatcgatgtc

SEQ ID NO: 5853 - DNA, 60 bp, Artificial Sequence
  Description of Artificial Sequence: targeting sequence/synthetic sequence
ccagccccgcccagccctcagccagccacctacacgtgtgtggtcagccacgaggactcc

SEQ ID NO: 5854 - DNA, 60 bp, Artificial Sequence
  Description of Artificial Sequence: targeting sequence/synthetic sequence
gctggccggggggcctctcagccgcccacccccacccctgcctcggatgcttttcagcgc

SEQ ID NO: 5855 - DNA, 60 bp, Artificial Sequence
  Description of Artificial Sequence: targeting sequence/synthetic sequence
gtggctccccccacacccctcacccctacctcacacacggctaacacctccccccggcct

SEQ ID NO: 5856 - DNA, 60 bp, Artificial Sequence
  Description of Artificial Sequence: targeting sequence/synthetic sequence
tctgaggtgggggagatagatgcagatgaagaggtgaagaaggctttgactggtattaag

SEQ ID NO: 5857 - DNA, 60 bp, Artificial Sequence
  Description of Artificial Sequence: targeting sequence/synthetic sequence
gctctagggtgttgcagtgacggcaagaccccaagtttggacgccgagggatcgaattgc

SEQ ID NO: 5858 - DNA, 60 bp, Artificial Sequence
  Description of Artificial Sequence: targeting sequence/synthetic sequence
aaactatgttctgatatagatgaatgtgagatgggtgtcccagtgtgcccccctgcctcc

SEQ ID NO: 5859 - DNA, 60 bp, Artificial Sequence
  Description of Artificial Sequence: targeting sequence/synthetic sequence
ttcctgttccttctgttcctgttagtctatgttaccaccattgtgggaaacctccttatc

SEQ ID NO: 5860 - DNA, 60 bp, Artificial Sequence
  Description of Artificial Sequence: targeting sequence/synthetic sequence
agtgtttctcagagcagttctgatgctggcctgggcagcgaccatgagagtgacacgctg

SEQ ID NO: 5861 - DNA, 60 bp, Artificial Sequence
  Description of Artificial Sequence: targeting sequence/synthetic sequence
ggaaaactatgttctgatatagatgaatgtgagatgggtgtcccagtgtgcccccctgcc

SEQ ID NO: 5862 - DNA, 60 bp, Artificial Sequence
  Description of Artificial Sequence: targeting sequence/synthetic sequence
gaggccagtggggccggggaggcccgggccagcaccgggagctcagattcttcccctggt

SEQ ID NO: 5863 - DNA, 60 bp, Artificial Sequence
  Description of Artificial Sequence: targeting sequence/synthetic sequence
ctgcgtgtcccagccccgcccagccctcagccagccacctacacgtgtgtggtcagccac

SEQ ID NO: 5864 - DNA, 60 bp, Artificial Sequence
  Description of Artificial Sequence: targeting sequence/synthetic sequence
ctgcagaccggcagcgaggaactgaagagcctgtacaacgccgtggtcgtgctgtactat

SEQ ID NO: 5865 - protein, 20 aa, Artificial Sequence
  Description of Artificial Sequence: targeting sequence/synthetic sequence
EAAASQRSSSLASNRLKIAL

SEQ ID NO: 5866 - protein, 20 aa, Artificial Sequence
  Description of Artificial Sequence: targeting sequence/synthetic sequence
RSSLGYKKAEDEMSRATSVG

SEQ ID NO: 5867 - protein, 20 aa, Artificial Sequence
  Description of Artificial Sequence: targeting sequence/synthetic sequence
LAGQRQGTQAESNLSSKFQF

SEQ ID NO: 5868 - protein, 20 aa, Artificial Sequence
  Description of Artificial Sequence: targeting sequence/synthetic sequence
FIFKFNETAPVPTIPPLDTK

SEQ ID NO: 5869 - protein, 20 aa, Artificial Sequence
  Description of Artificial Sequence: targeting sequence/synthetic sequence
GVHAKSSDWGLQAGYIPVNP

SEQ ID NO: 5870 - protein, 20 aa, Artificial Sequence
  Description of Artificial Sequence: targeting sequence/synthetic sequence
VVYTGHDTKLMQNSTKAPLK

SEQ ID NO: 5871 - protein, 20 aa, Artificial Sequence
  Description of Artificial Sequence: targeting sequence/synthetic sequence
RFSVVMSETVPAASASAGVA

SEQ ID NO: 5872 - protein, 20 aa, Artificial Sequence
  Description of Artificial Sequence: targeting sequence/synthetic sequence
VKIQRVNNSSTNDNLVRKND

SEQ ID NO: 5873 - protein, 20 aa, Artificial Sequence
  Description of Artificial Sequence: targeting sequence/synthetic sequence
HDTKLMQNSTKAPLKRSNVE

SEQ ID NO: 5874 - protein, 20 aa, Artificial Sequence
  Description of Artificial Sequence: targeting sequence/synthetic sequence
KTPLTANITKSGNTFRPEVH

SEQ ID NO: 5875 - protein, 20 aa, Artificial Sequence
  Description of Artificial Sequence: targeting sequence/synthetic sequence
ALGVATAAAVTAGVAIAKTI

SEQ ID NO: 5876 - protein, 20 aa, Artificial Sequence
  Description of Artificial Sequence: targeting sequence/synthetic sequence
PGMTNQDNKIVVKNATKSNV

SEQ ID NO: 5877 - protein, 20 aa, Artificial Sequence
  Description of Artificial Sequence: targeting sequence/synthetic sequence
LKTPLTANITKSGNTFRPEV

SEQ ID NO: 5878 - protein, 20 aa, Artificial Sequence
  Description of Artificial Sequence: targeting sequence/synthetic sequence
QNLSLPNSTAQALLAARVDP

SEQ ID NO: 5879 - protein, 20 aa, Artificial Sequence
  Description of Artificial Sequence: targeting sequence/synthetic sequence
DKRRNGPEFSNDIKKRKVDD

SEQ ID NO: 5880 - protein, 20 aa, Artificial Sequence
  Description of Artificial Sequence: targeting sequence/synthetic sequence
ENGGARLAEYHAKATEHLST

SEQ ID NO: 5881 - protein, 20 aa, Artificial Sequence
  Description of Artificial Sequence: targeting sequence/synthetic sequence
EQLGGTVTNPGGSGTSSRLE

SEQ ID NO: 5882 - protein, 20 aa, Artificial Sequence
  Description of Artificial Sequence: targeting sequence/synthetic sequence
SKLYKEAEKIKKWKVSTEAE

SEQ ID NO: 5883 - protein, 20 aa, Artificial Sequence
  Description of Artificial Sequence: targeting sequence/synthetic sequence
LKASSTMAKSENLVKSHVQL

SEQ ID NO: 5884 - protein, 20 aa, Artificial Sequence
  Description of Artificial Sequence: targeting sequence/synthetic sequence
ISSDSNNLKLNNVRLPRENM

SEQ ID NO: 5885 - protein, 20 aa, Artificial Sequence
  Description of Artificial Sequence: targeting sequence/synthetic sequence
GRARALNESKRVNNGNTAPE

SEQ ID NO: 5886 - protein, 20 aa, Artificial Sequence
  Description of Artificial Sequence: targeting sequence/synthetic sequence
ELKTPLTANITKSGNTFRPE

SEQ ID NO: 5887 - protein, 20 aa, Artificial Sequence
  Description of Artificial Sequence: targeting sequence/synthetic sequence
RISKEILTQGQINSTSGLNK

SEQ ID NO: 5888 - protein, 20 aa, Artificial Sequence
  Description of Artificial Sequence: targeting sequence/synthetic sequence
RNGPEFSNDIKKRKVDDKDS

SEQ ID NO: 5889 - protein, 20 aa, Artificial Sequence
  Description of Artificial Sequence: targeting sequence/synthetic sequence
LLRKGNYSERVGAGAPVYLA

SEQ ID NO: 5890 - protein, 20 aa, Artificial Sequence
  Description of Artificial Sequence: targeting sequence/synthetic sequence
ILEVSSLPTTNSTTNSATKI

SEQ ID NO: 5891 - protein, 20 aa, Artificial Sequence
  Description of Artificial Sequence: targeting sequence/synthetic sequence
DSFVIRGDEVRQIAPGQTGK

SEQ ID NO: 5892 - protein, 20 aa, Artificial Sequence
  Description of Artificial Sequence: targeting sequence/synthetic sequence
RSFHSGGYGQDALGMDPMME

SEQ ID NO: 5893 - protein, 20 aa, Artificial Sequence
  Description of Artificial Sequence: targeting sequence/synthetic sequence
RTSGLLETNFTASARTTGSG

SEQ ID NO: 5894 - protein, 20 aa, Artificial Sequence
  Description of Artificial Sequence: targeting sequence/synthetic sequence
KASSTMAKSENLVKSHVQLQ

SEQ ID NO: 5895 - protein, 20 aa, Artificial Sequence
  Description of Artificial Sequence: targeting sequence/synthetic sequence
KENGGARLAEYHAKATEHLS

SEQ ID NO: 5896 - protein, 20 aa, Artificial Sequence
  Description of Artificial Sequence: targeting sequence/synthetic sequence
SALAGQRQGTQAESNLSSKF

SEQ ID NO: 5897 - protein, 20 aa, Artificial Sequence
  Description of Artificial Sequence: targeting sequence/synthetic sequence
PEFSNDIKKRKVDDKDSSHY

SEQ ID NO: 5898 - protein, 20 aa, Artificial Sequence
  Description of Artificial Sequence: targeting sequence/synthetic sequence
IVVYTGHDTKLMQNSTKAPL

SEQ ID NO: 5899 - protein, 20 aa, Artificial Sequence
  Description of Artificial Sequence: targeting sequence/synthetic sequence
EFSNDIKKRKVDDKDSSHYD

SEQ ID NO: 5900 - protein, 20 aa, Artificial Sequence
  Description of Artificial Sequence: targeting sequence/synthetic sequence
YGQDNTCEEYHTVGPHSCHI

SEQ ID NO: 5901 - protein, 20 aa, Artificial Sequence
  Description of Artificial Sequence: targeting sequence/synthetic sequence
GPEFSNDIKKRKVDDKDSSH

SEQ ID NO: 5902 - protein, 20 aa, Artificial Sequence
  Description of Artificial Sequence: targeting sequence/synthetic sequence
HPELKTPLTANITKSGNTFR

SEQ ID NO: 5903 - protein, 20 aa, Artificial Sequence
  Description of Artificial Sequence: targeting sequence/synthetic sequence
LGVLSAAGSTMGAAATTLAV

SEQ ID NO: 5904 - protein, 20 aa, Artificial Sequence
  Description of Artificial Sequence: targeting sequence/synthetic sequence
AAHPELKTPLTANITKSGNT

SEQ ID NO: 5905 - protein, 20 aa, Artificial Sequence
  Description of Artificial Sequence: targeting sequence/synthetic sequence
AGGSSSNSTREPPASGRVAL

SEQ ID NO: 5906 - protein, 20 aa, Artificial Sequence
  Description of Artificial Sequence: targeting sequence/synthetic sequence
VVLANASRIHYDGGAGTNTV

SEQ ID NO: 5907 - protein, 20 aa, Artificial Sequence
  Description of Artificial Sequence: targeting sequence/synthetic sequence
RLQLDALQRGKGLSHGVPEH

SEQ ID NO: 5908 - protein, 20 aa, Artificial Sequence
  Description of Artificial Sequence: targeting sequence/synthetic sequence
VEAAASQRSSSLASNRLKIA

SEQ ID NO: 5909 - protein, 20 aa, Artificial Sequence
  Description of Artificial Sequence: targeting sequence/synthetic sequence
AHPELKTPLTANITKSGNTF

SEQ ID NO: 5910 - protein, 20 aa, Artificial Sequence
  Description of Artificial Sequence: targeting sequence/synthetic sequence
DSIGVLGYQKTVDHTKVNSK

SEQ ID NO: 5911 - protein, 20 aa, Artificial Sequence
  Description of Artificial Sequence: targeting sequence/synthetic sequence
SHVQLQNYSKVERHPVTALE

SEQ ID NO: 5912 - protein, 20 aa, Artificial Sequence
  Description of Artificial Sequence: targeting sequence/synthetic sequence
ASSTMAKSENLVKSHVQLQN

SEQ ID NO: 5913 - protein, 20 aa, Artificial Sequence
  Description of Artificial Sequence: targeting sequence/synthetic sequence
KQVHPDTGISSKAMGIMNSF

SEQ ID NO: 5914 - protein, 20 aa, Artificial Sequence
  Description of Artificial Sequence: targeting sequence/synthetic sequence
VLGQKLSLTQSDISHIGSMR

SEQ ID NO: 5915 - protein, 20 aa, Artificial Sequence
  Description of Artificial Sequence: targeting sequence/synthetic sequence
SRGTTGNTQVQSPSNATTAT

SEQ ID NO: 5916 - protein, 20 aa, Artificial Sequence
  Description of Artificial Sequence: targeting sequence/synthetic sequence
PAGGSSSNSTREPPASGRVA

SEQ ID NO: 5917 - protein, 20 aa, Artificial Sequence
  Description of Artificial Sequence: targeting sequence/synthetic sequence
EVSSLPTTNSTTNSATKITA

SEQ ID NO: 5918 - protein, 20 aa, Artificial Sequence
  Description of Artificial Sequence: targeting sequence/synthetic sequence
VLKQVHPDTGISSKAMGIMN

SEQ ID NO: 5919 - protein, 20 aa, Artificial Sequence
  Description of Artificial Sequence: targeting sequence/synthetic sequence
LVPAGGSSSNSTREPPASGR

SEQ ID NO: 5920 - protein, 20 aa, Artificial Sequence
  Description of Artificial Sequence: targeting sequence/synthetic sequence
NQGSKYVNKEIQNAVNGVKQ

SEQ ID NO: 5921 - protein, 20 aa, Artificial Sequence
  Description of Artificial Sequence: targeting sequence/synthetic sequence
KPTSNVHVSVAGSHSQAANF

SEQ ID NO: 5922 - protein, 20 aa, Artificial Sequence
  Description of Artificial Sequence: targeting sequence/synthetic sequence
SVLNSNAIKNLPPPLGGAAG

SEQ ID NO: 5923 - protein, 20 aa, Artificial Sequence
  Description of Artificial Sequence: targeting sequence/synthetic sequence
VGTQGRACNKTAPQASGCDL

SEQ ID NO: 5924 - protein, 20 aa, Artificial Sequence
  Description of Artificial Sequence: targeting sequence/synthetic sequence
SDSIGVLGYQKTVDHTKVNS

SEQ ID NO: 5925 - protein, 20 aa, Artificial Sequence
  Description of Artificial Sequence: targeting sequence/synthetic sequence
DFRIHVENQTRARDDVSRKQ

SEQ ID NO: 5926 - protein, 20 aa, Artificial Sequence
  Description of Artificial Sequence: targeting sequence/synthetic sequence
SMSNHTKERVTMTKVTLENF

SEQ ID NO: 5927 - protein, 20 aa, Artificial Sequence
  Description of Artificial Sequence: targeting sequence/synthetic sequence
LKQVHPDTGISSKAMGIMNS

SEQ ID NO: 5928 - protein, 20 aa, Artificial Sequence
  Description of Artificial Sequence: targeting sequence/synthetic sequence
VTWLVRHTENVTKTKTPEDY

SEQ ID NO: 5929 - protein, 20 aa, Artificial Sequence
  Description of Artificial Sequence: targeting sequence/synthetic sequence
NGPEFSNDIKKRKVDDKDSS

SEQ ID NO: 5930 - protein, 20 aa, Artificial Sequence
  Description of Artificial Sequence: targeting sequence/synthetic sequence
VSSLPTTNSTTNSATKITAN

SEQ ID NO: 5931 - protein, 20 aa, Artificial Sequence
  Description of Artificial Sequence: targeting sequence/synthetic sequence
NVHVSVAGSHSQAANFAAQK

SEQ ID NO: 5932 - protein, 20 aa, Artificial Sequence
  Description of Artificial Sequence: targeting sequence/synthetic sequence
LETGGEAGITRSVVATTRAR

SEQ ID NO: 5933 - protein, 20 aa, Artificial Sequence
  Description of Artificial Sequence: targeting sequence/synthetic sequence
VRHTENVTKTKTPEDYADSS

SEQ ID NO: 5934 - protein, 20 aa, Artificial Sequence
  Description of Artificial Sequence: targeting sequence/synthetic sequence
TLNSVLNSNAIKNLPPPLGG

SEQ ID NO: 5935 - protein, 20 aa, Artificial Sequence
  Description of Artificial Sequence: targeting sequence/synthetic sequence
PELKTPLTANITKSGNTFRP

SEQ ID NO: 5936 - protein, 20 aa, Artificial Sequence
  Description of Artificial Sequence: targeting sequence/synthetic sequence
RVNNSSTNDNLVRKNDQVYI

SEQ ID NO: 5937 - protein, 20 aa, Artificial Sequence
  Description of Artificial Sequence: targeting sequence/synthetic sequence
QRVNNSSTNDNLVRKNDQVY

SEQ ID NO: 5938 - protein, 20 aa, Artificial Sequence
  Description of Artificial Sequence: targeting sequence/synthetic sequence
EYPERPASRANTVRSFHHEE

SEQ ID NO: 5939 - protein, 20 aa, Artificial Sequence
  Description of Artificial Sequence: targeting sequence/synthetic sequence
SVGTQGRACNKTAPQASGCD

SEQ ID NO: 5940 - protein, 20 aa, Artificial Sequence
  Description of Artificial Sequence: targeting sequence/synthetic sequence
QGLVPAGGSSSNSTREPPAS

SEQ ID NO: 5941 - protein, 20 aa, Artificial Sequence
  Description of Artificial Sequence: targeting sequence/synthetic sequence
RFQDSSSSKAPPPSLPSPSR

SEQ ID NO: 5942 - protein, 20 aa, Artificial Sequence
  Description of Artificial Sequence: targeting sequence/synthetic sequence
LRHLGLSKSDSSNSDSTQSQ

SEQ ID NO: 5943 - protein, 20 aa, Artificial Sequence
  Description of Artificial Sequence: targeting sequence/synthetic sequence
GAAMGAASLTLSAQSRTLLA

SEQ ID NO: 5944 - protein, 20 aa, Artificial Sequence
  Description of Artificial Sequence: targeting sequence/synthetic sequence
KSVSGDVELTNIIKNSSFKA

SEQ ID NO: 5945 - protein, 20 aa, Artificial Sequence
  Description of Artificial Sequence: targeting sequence/synthetic sequence
YMAASGLNASTYDQVGRSHI

SEQ ID NO: 5946 - protein, 20 aa, Artificial Sequence
  Description of Artificial Sequence: targeting sequence/synthetic sequence
AGLVTGMADGVVASNHAGYE

SEQ ID NO: 5947 - protein, 20 aa, Artificial Sequence
  Description of Artificial Sequence: targeting sequence/synthetic sequence
WLEDQREVNTSGFAPARPPP

SEQ ID NO: 5948 - protein, 20 aa, Artificial Sequence
  Description of Artificial Sequence: targeting sequence/synthetic sequence
INHSGSTNYNPSLKSRVTIS

SEQ ID NO: 5949 - protein, 20 aa, Artificial Sequence
  Description of Artificial Sequence: targeting sequence/synthetic sequence
LVRHTENVTKTKTPEDYADS

SEQ ID NO: 5950 - protein, 20 aa, Artificial Sequence
  Description of Artificial Sequence: targeting sequence/synthetic sequence
SNQGSKYVNKEIQNAVNGVK

SEQ ID NO: 5951 - protein, 20 aa, Artificial Sequence
  Description of Artificial Sequence: targeting sequence/synthetic sequence
HVSVAGSHSQAANFAAQKTH

SEQ ID NO: 5952 - protein, 20 aa, Artificial Sequence
  Description of Artificial Sequence: targeting sequence/synthetic sequence
SAGPGTSGSHLDRSTVSSFS

SEQ ID NO: 5953 - protein, 20 aa, Artificial Sequence
  Description of Artificial Sequence: targeting sequence/synthetic sequence
GSAMGAASLTLSAQSRTLLA

SEQ ID NO: 5954 - protein, 20 aa, Artificial Sequence
  Description of Artificial Sequence: targeting sequence/synthetic sequence
SSTMAKSENLVKSHVQLQNY

SEQ ID NO: 5955 - protein, 20 aa, Artificial Sequence
  Description of Artificial Sequence: targeting sequence/synthetic sequence
MLTCPEANATKVCGSDGVTY

SEQ ID NO: 5956 - protein, 20 aa, Artificial Sequence
  Description of Artificial Sequence: targeting sequence/synthetic sequence
VPAGGSSSNSTREPPASGRV

SEQ ID NO: 5957 - protein, 20 aa, Artificial Sequence
  Description of Artificial Sequence: targeting sequence/synthetic sequence
PEENKIRQEDLTKIISSAQK

SEQ ID NO: 5958 - protein, 20 aa, Artificial Sequence
  Description of Artificial Sequence: targeting sequence/synthetic sequence
LTAEILELAGNAARDNKKTR

SEQ ID NO: 5959 - protein, 20 aa, Artificial Sequence
  Description of Artificial Sequence: targeting sequence/synthetic sequence
YRQVNQISGAHNTSDKQTPS

SEQ ID NO: 5960 - protein, 20 aa, Artificial Sequence
  Description of Artificial Sequence: targeting sequence/synthetic sequence
EVHNAKTKPREEQYNSTYRV

SEQ ID NO: 5961 - protein, 20 aa, Artificial Sequence
  Description of Artificial Sequence: targeting sequence/synthetic sequence
SKPEENKIRQEDLTKIISSA

SEQ ID NO: 5962 - protein, 20 aa, Artificial Sequence
  Description of Artificial Sequence: targeting sequence/synthetic sequence
LNLEGNGIATDVPSATKRWG

SEQ ID NO: 5963 - protein, 20 aa, Artificial Sequence
  Description of Artificial Sequence: targeting sequence/synthetic sequence
EENKIRQEDLTKIISSAQKV

SEQ ID NO: 5964 - protein, 20 aa, Artificial Sequence
  Description of Artificial Sequence: targeting sequence/synthetic sequence
NVIRDAVTYTEHAKRKTVTA

SEQ ID NO: 5965 - protein, 20 aa, Artificial Sequence
  Description of Artificial Sequence: targeting sequence/synthetic sequence
RQVNQISGAHNTSDKQTPSK

SEQ ID NO: 5966 - protein, 20 aa, Artificial Sequence
  Description of Artificial Sequence: targeting sequence/synthetic sequence
TAEILELAGNAARDNKKTRI

SEQ ID NO: 5967 - protein, 20 aa, Artificial Sequence
  Description of Artificial Sequence: targeting sequence/synthetic sequence
NLEGNGIATDVPSATKRWGF

SEQ ID NO: 5968 - protein, 20 aa, Artificial Sequence
  Description of Artificial Sequence: targeting sequence/synthetic sequence
GLNLEGNGIATDVPSATKRW

SEQ ID NO: 5969 - protein, 20 aa, Artificial Sequence
  Description of Artificial Sequence: targeting sequence/synthetic sequence
ERPGGNEITRGGSTSYGTGS

SEQ ID NO: 5970 - protein, 20 aa, Artificial Sequence
  Description of Artificial Sequence: targeting sequence/synthetic sequence
LEQNGSPLGRGRLGSTGAKM

SEQ ID NO: 5971 - protein, 20 aa, Artificial Sequence
  Description of Artificial Sequence: targeting sequence/synthetic sequence
VKAGPAQTLIRPQDMKGASR

SEQ ID NO: 5972 - protein, 20 aa, Artificial Sequence
  Description of Artificial Sequence: targeting sequence/synthetic sequence
SSSKPEENKIRQEDLTKIIS

SEQ ID NO: 5973 - protein, 20 aa, Artificial Sequence
  Description of Artificial Sequence: targeting sequence/synthetic sequence
TILRDDSKNSVHLQMNSLKT

SEQ ID NO: 5974 - protein, 20 aa, Artificial Sequence
  Description of Artificial Sequence: targeting sequence/synthetic sequence
FQFSSNKEQNGVQDPQHERI

SEQ ID NO: 5975 - protein, 20 aa, Artificial Sequence
  Description of Artificial Sequence: targeting sequence/synthetic sequence
EVHNAKTKPREEQFNSTYRV

SEQ ID NO: 5976 - protein, 20 aa, Artificial Sequence
  Description of Artificial Sequence: targeting sequence/synthetic sequence
FVTKLKQLEMLENQIATIHQ

SEQ ID NO: 5977 - protein, 20 aa, Artificial Sequence
  Description of Artificial Sequence: targeting sequence/synthetic sequence
SIVADQLEKNRLPSVHPHHS

SEQ ID NO: 5978 - protein, 20 aa, Artificial Sequence
  Description of Artificial Sequence: targeting sequence/synthetic sequence
LITNSVEMHAYTVQRLYKAI

SEQ ID NO: 5979 - protein, 20 aa, Artificial Sequence
  Description of Artificial Sequence: targeting sequence/synthetic sequence
AMGAGVAGRITGSMSLASGK

SEQ ID NO: 5980 - protein, 20 aa, Artificial Sequence
  Description of Artificial Sequence: targeting sequence/synthetic sequence
VEVHNAKTKPREEQYNSTYR

SEQ ID NO: 5981 - protein, 20 aa, Artificial Sequence
  Description of Artificial Sequence: targeting sequence/synthetic sequence
VSSSKPEENKIRQEDLTKII

SEQ ID NO: 5982 - protein, 20 aa, Artificial Sequence
  Description of Artificial Sequence: targeting sequence/synthetic sequence
KFQFSSNKEQNGVQDPQHER

SEQ ID NO: 5983 - protein, 20 aa, Artificial Sequence
  Description of Artificial Sequence: targeting sequence/synthetic sequence
TAEILELAGNASRDNKKTRI

SEQ ID NO: 5984 - protein, 20 aa, Artificial Sequence
  Description of Artificial Sequence: targeting sequence/synthetic sequence
NKIRQEDLTKIISSAQKVQI

SEQ ID NO: 5985 - protein, 20 aa, Artificial Sequence
  Description of Artificial Sequence: targeting sequence/synthetic sequence
EFVNDLKRANSNLVAAYEKA

SEQ ID NO: 5986 - protein, 20 aa, Artificial Sequence
  Description of Artificial Sequence: targeting sequence/synthetic sequence
NLEGNGVATDVPTATKRWGF

SEQ ID NO: 5987 - protein, 20 aa, Artificial Sequence
  Description of Artificial Sequence: targeting sequence/synthetic sequence
ALAAAGYDVEKNNSRIKLGL

SEQ ID NO: 5988 - protein, 20 aa, Artificial Sequence
  Description of Artificial Sequence: targeting sequence/synthetic sequence
IRQEDLTKIISSAQKVQIKQ

SEQ ID NO: 5989 - protein, 20 aa, Artificial Sequence
  Description of Artificial Sequence: targeting sequence/synthetic sequence
SSKPEENKIRQEDLTKIISS

SEQ ID NO: 5990 - protein, 20 aa, Artificial Sequence
  Description of Artificial Sequence: targeting sequence/synthetic sequence
TMAKSENLVKSHVQLQNYSK

SEQ ID NO: 5991 - protein, 20 aa, Artificial Sequence
  Description of Artificial Sequence: targeting sequence/synthetic sequence
MLESNNVITFNGLANSSSYH

SEQ ID NO: 5992 - protein, 20 aa, Artificial Sequence
  Description of Artificial Sequence: targeting sequence/synthetic sequence
LDKNYLLNNKIPSNNVEEAG

SEQ ID NO: 5993 - protein, 20 aa, Artificial Sequence
  Description of Artificial Sequence: targeting sequence/synthetic sequence
RRFVQNALNGNGDPNNMDRA

SEQ ID NO: 5994 - protein, 20 aa, Artificial Sequence
  Description of Artificial Sequence: targeting sequence/synthetic sequence
PGANGLPGAAGERGAPGFRG

SEQ ID NO: 5995 - protein, 20 aa, Artificial Sequence
  Description of Artificial Sequence: targeting sequence/synthetic sequence
SLNNAILRANLPKSKGNPAA

SEQ ID NO: 5996 - protein, 20 aa, Artificial Sequence
  Description of Artificial Sequence: targeting sequence/synthetic sequence
KLVSIVADQLEKNRLPSVHP

SEQ ID NO: 5997 - protein, 20 aa, Artificial Sequence
  Description of Artificial Sequence: targeting sequence/synthetic sequence
VTRSPGGSQEQRAKTPQTRV

SEQ ID NO: 5998 - protein, 20 aa, Artificial Sequence
  Description of Artificial Sequence: targeting sequence/synthetic sequence
SGSSQNRIRDSEYEIQRQAK

SEQ ID NO: 5999 - protein, 20 aa, Artificial Sequence
  Description of Artificial Sequence: targeting sequence/synthetic sequence
ALAAAGYDVEKNNSRIKLSL

SEQ ID NO: 6000 - protein, 20 aa, Artificial Sequence
  Description of Artificial Sequence: targeting sequence/synthetic sequence
ATLKSLNNQIESIRSPEGSR

SEQ ID NO: 6001 - protein, 20 aa, Artificial Sequence
  Description of Artificial Sequence: targeting sequence/synthetic sequence
YFAPANTDANNIEGQAIRYQ

SEQ ID NO: 6002 - protein, 20 aa, Artificial Sequence
  Description of Artificial Sequence: targeting sequence/synthetic sequence
LKSLNNQIESIRSPEGSRKN

SEQ ID NO: 6003 - protein, 20 aa, Artificial Sequence
  Description of Artificial Sequence: targeting sequence/synthetic sequence
FRENAIDGEHSGKATHARIG

SEQ ID NO: 6004 - protein, 20 aa, Artificial Sequence
  Description of Artificial Sequence: targeting sequence/synthetic sequence
VSEGFNIGNLAVNNRGQSIK

SEQ ID NO: 6005 - protein, 20 aa, Artificial Sequence
  Description of Artificial Sequence: targeting sequence/synthetic sequence
PPVPSVQKLVEDRWNKPQKT

SEQ ID NO: 6006 - protein, 20 aa, Artificial Sequence
  Description of Artificial Sequence: targeting sequence/synthetic sequence
SFQGSKRGLNSSFETSPKKV

SEQ ID NO: 6007 - protein, 20 aa, Artificial Sequence
  Description of Artificial Sequence: targeting sequence/synthetic sequence
ELRARLLPHANEVSQKIGDN

SEQ ID NO: 6008 - protein, 20 aa, Artificial Sequence
  Description of Artificial Sequence: targeting sequence/synthetic sequence
IHRDLKPDNMLISNEGHIKL

SEQ ID NO: 6009 - protein, 20 aa, Artificial Sequence
  Description of Artificial Sequence: targeting sequence/synthetic sequence
AAEHNKVVTKDFDVIRNVIK

SEQ ID NO: 6010 - protein, 20 aa, Artificial Sequence
  Description of Artificial Sequence: targeting sequence/synthetic sequence
AEILELAGNAARDNKKTRII

SEQ ID NO: 6011 - protein, 20 aa, Artificial Sequence
  Description of Artificial Sequence: targeting sequence/synthetic sequence
AEFVNDLKRANSNLVAAYEK

SEQ ID NO: 6012 - protein, 20 aa, Artificial Sequence
  Description of Artificial Sequence: targeting sequence/synthetic sequence
HNYTQPRGNFIPYANEERRE

SEQ ID NO: 6013 - protein, 20 aa, Artificial Sequence
  Description of Artificial Sequence: targeting sequence/synthetic sequence
EQNGSPLGRGRLGSTGAKMQ

SEQ ID NO: 6014 - protein, 20 aa, Artificial Sequence
  Description of Artificial Sequence: targeting sequence/synthetic sequence
IEKTISKAKGQPREPQVYTL

SEQ ID NO: 6015 - protein, 20 aa, Artificial Sequence
  Description of Artificial Sequence: targeting sequence/synthetic sequence
LVSIVADQLEKNRLPSVHPH

SEQ ID NO: 6016 - protein, 20 aa, Artificial Sequence
  Description of Artificial Sequence: targeting sequence/synthetic sequence
PGESPGIVSNYNNSILARVY

SEQ ID NO: 6017 - protein, 20 aa, Artificial Sequence
  Description of Artificial Sequence: targeting sequence/synthetic sequence
TSLLKTVQTDHNAVQRHRST

SEQ ID NO: 6018 - protein, 20 aa, Artificial Sequence
  Description of Artificial Sequence: targeting sequence/synthetic sequence
GKKQLVEIEKVVLHPNYSQV

SEQ ID NO: 6019 - protein, 20 aa, Artificial Sequence
  Description of Artificial Sequence: targeting sequence/synthetic sequence
LEGNGVATDVPTATKRWGFR

SEQ ID NO: 6020 - protein, 20 aa, Artificial Sequence
  Description of Artificial Sequence: targeting sequence/synthetic sequence
GLKSLVSKGTLVQTKGTGAS

SEQ ID NO: 6021 - protein, 20 aa, Artificial Sequence
  Description of Artificial Sequence: targeting sequence/synthetic sequence
KVGLQVVAVKAPGFGDNRKN

SEQ ID NO: 6022 - protein, 20 aa, Artificial Sequence
  Description of Artificial Sequence: targeting sequence/synthetic sequence
LLKTVQTDHNAVQRHRSTIV

SEQ ID NO: 6023 - protein, 20 aa, Artificial Sequence
  Description of Artificial Sequence: targeting sequence/synthetic sequence
QGQQAQTPTGKQTDKTKSNM

SEQ ID NO: 6024 - protein, 20 aa, Artificial Sequence
  Description of Artificial Sequence: targeting sequence/synthetic sequence
YLNQPHLNKFRDNQISTAKY

SEQ ID NO: 6025 - protein, 20 aa, Artificial Sequence
  Description of Artificial Sequence: targeting sequence/synthetic sequence
VSSFQGSKRGLNSSFETSPK

SEQ ID NO: 6026 - protein, 20 aa, Artificial Sequence
  Description of Artificial Sequence: targeting sequence/synthetic sequence
AAARPVTRSPGGSQEQRAKT

SEQ ID NO: 6027 - protein, 20 aa, Artificial Sequence
  Description of Artificial Sequence: targeting sequence/synthetic sequence
YSQMQSQAGGNNTGSTPLRK

SEQ ID NO: 6028 - protein, 20 aa, Artificial Sequence
  Description of Artificial Sequence: targeting sequence/synthetic sequence
GLLIPTSGTDTTVTKPKSRI

SEQ ID NO: 6029 - protein, 20 aa, Artificial Sequence
  Description of Artificial Sequence: targeting sequence/synthetic sequence
MAKSENLVKSHVQLQNYSKV

SEQ ID NO: 6030 - protein, 20 aa, Artificial Sequence
  Description of Artificial Sequence: targeting sequence/synthetic sequence
KSLNNQIESIRSPEGSRKNP

SEQ ID NO: 6031 - protein, 20 aa, Artificial Sequence
  Description of Artificial Sequence: targeting sequence/synthetic sequence
PETFLSTNKLENQLLLQRQK

SEQ ID NO: 6032 - protein, 20 aa, Artificial Sequence
  Description of Artificial Sequence: targeting sequence/synthetic sequence
SIKALVQNDTLLQVKGTGAN

SEQ ID NO: 6033 - protein, 20 aa, Artificial Sequence
  Description of Artificial Sequence: targeting sequence/synthetic sequence
MRMELERPGGNEITRGGSTS

SEQ ID NO: 6034 - protein, 20 aa, Artificial Sequence
  Description of Artificial Sequence: targeting sequence/synthetic sequence
IEKTISKTKGQPREPQVYTL

SEQ ID NO: 6035 - protein, 20 aa, Artificial Sequence
  Description of Artificial Sequence: targeting sequence/synthetic sequence
IPHMTSENTVLQGYTIPKGT

SEQ ID NO: 6036 - protein, 20 aa, Artificial Sequence
  Description of Artificial Sequence: targeting sequence/synthetic sequence
DNYGTQLNAVNNSLTPQSTK

SEQ ID NO: 6037 - protein, 20 aa, Artificial Sequence
  Description of Artificial Sequence: targeting sequence/synthetic sequence
RNNMIQTKPTGTQQSTNTAV

SEQ ID NO: 6038 - protein, 20 aa, Artificial Sequence
  Description of Artificial Sequence: targeting sequence/synthetic sequence
PPLPSVTKLTEDRWNKPQKT

SEQ ID NO: 6039 - protein, 20 aa, Artificial Sequence
  Description of Artificial Sequence: targeting sequence/synthetic sequence
KVVTKDFDVIRNVIKDNATF

SEQ ID NO: 6040 - protein, 20 aa, Artificial Sequence
  Description of Artificial Sequence: targeting sequence/synthetic sequence
KALAAAGYDVEKNNSRIKLG

SEQ ID NO: 6041 - protein, 20 aa, Artificial Sequence
  Description of Artificial Sequence: targeting sequence/synthetic sequence
SQNRIRDSEYEIQRQAKKSF

SEQ ID NO: 6042 - protein, 20 aa, Artificial Sequence
  Description of Artificial Sequence: targeting sequence/synthetic sequence
SLLKTVQTDHNAVQRHRSTI

SEQ ID NO: 6043 - protein, 20 aa, Artificial Sequence
  Description of Artificial Sequence: targeting sequence/synthetic sequence
NKVVTKDFDVIRNVIKDNAT

SEQ ID NO: 6044 - protein, 20 aa, Artificial Sequence
  Description of Artificial Sequence: targeting sequence/synthetic sequence
VAANVIGIGEPSRPSEKRRT

SEQ ID NO: 6045 - protein, 20 aa, Artificial Sequence
  Description of Artificial Sequence: targeting sequence/synthetic sequence
GRQDTSRMSTSQIPGRVASS

SEQ ID NO: 6046 - protein, 20 aa, Artificial Sequence
  Description of Artificial Sequence: targeting sequence/synthetic sequence
KTSSSKSTIFSGNGRNVVVE

SEQ ID NO: 6047 - protein, 20 aa, Artificial Sequence
  Description of Artificial Sequence: targeting sequence/synthetic sequence
SRVNAAVANRDSANGFINKV

SEQ ID NO: 6048 - protein, 20 aa, Artificial Sequence
  Description of Artificial Sequence: targeting sequence/synthetic sequence
EIRKVIKDNATFSTKNPAYP

SEQ ID NO: 6049 - protein, 20 aa, Artificial Sequence
  Description of Artificial Sequence: targeting sequence/synthetic sequence
GAGVAGRITGSMSLASGKSL

SEQ ID NO: 6050 - protein, 20 aa, Artificial Sequence
  Description of Artificial Sequence: targeting sequence/synthetic sequence
PILLPNKSGKKGNSADLTFP

SEQ ID NO: 6051 - protein, 20 aa, Artificial Sequence
  Description of Artificial Sequence: targeting sequence/synthetic sequence
VAVKAPGFGDNRKNQLKDMA

SEQ ID NO: 6052 - protein, 20 aa, Artificial Sequence
  Description of Artificial Sequence: targeting sequence/synthetic sequence
TRGDAFLNKNSILSNIHEVH

SEQ ID NO: 6053 - protein, 20 aa, Artificial Sequence
  Description of Artificial Sequence: targeting sequence/synthetic sequence
ILAKIPSENNKLTYSHGNYL

SEQ ID NO: 6054 - protein, 20 aa, Artificial Sequence
  Description of Artificial Sequence: targeting sequence/synthetic sequence
HRDLKPDNMLISNEGHIKLT

SEQ ID NO: 6055 - protein, 20 aa, Artificial Sequence
  Description of Artificial Sequence: targeting sequence/synthetic sequence
SVQYDINLVETSSTSAHHSH

SEQ ID NO: 6056 - protein, 20 aa, Artificial Sequence
  Description of Artificial Sequence: targeting sequence/synthetic sequence
VTKLTEDRWNEHQKMQGHRG

SEQ ID NO: 6057 - protein, 20 aa, Artificial Sequence
  Description of Artificial Sequence: targeting sequence/synthetic sequence
LLPNKSGKKGNSADLTFPEK

SEQ ID NO: 6058 - protein, 20 aa, Artificial Sequence
  Description of Artificial Sequence: targeting sequence/synthetic sequence
RKVSSSKPEENKIRQEDLTK

SEQ ID NO: 6059 - protein, 20 aa, Artificial Sequence
  Description of Artificial Sequence: targeting sequence/synthetic sequence
GPAGKEGGKGPRGETGPAGR

SEQ ID NO: 6060 - protein, 20 aa, Artificial Sequence
  Description of Artificial Sequence: targeting sequence/synthetic sequence
GCQISGRGARGCNGIPGAAA

SEQ ID NO: 6061 - protein, 20 aa, Artificial Sequence
  Description of Artificial Sequence: targeting sequence/synthetic sequence
IPTSGTDTTVTKPKSRIFGN

SEQ ID NO: 6062 - protein, 20 aa, Artificial Sequence
  Description of Artificial Sequence: targeting sequence/synthetic sequence
RINDISHTQSVSSKQKVTGL

SEQ ID NO: 6063 - protein, 20 aa, Artificial Sequence
  Description of Artificial Sequence: targeting sequence/synthetic sequence
SSFQGSKRGLNSSFETSPKK

SEQ ID NO: 6064 - protein, 20 aa, Artificial Sequence
  Description of Artificial Sequence: targeting sequence/synthetic sequence
KSLVSKGTLVQTKGTGASGS

SEQ ID NO: 6065 - protein, 20 aa, Artificial Sequence
  Description of Artificial Sequence: targeting sequence/synthetic sequence
NDISHTQSVSSKQKVTGLDF

SEQ ID NO: 6066 - protein, 20 aa, Artificial Sequence
  Description of Artificial Sequence: targeting sequence/synthetic sequence
GLPGVGLTPSAAQTARQHPK

SEQ ID NO: 6067 - protein, 20 aa, Artificial Sequence
  Description of Artificial Sequence: targeting sequence/synthetic sequence
EKTISKTKGQPREPQVYTLP

SEQ ID NO: 6068 - protein, 20 aa, Artificial Sequence
  Description of Artificial Sequence: targeting sequence/synthetic sequence
NEYFNSINDSKILSLQNKKN

SEQ ID NO: 6069 - protein, 20 aa, Artificial Sequence
  Description of Artificial Sequence: targeting sequence/synthetic sequence
KEDENRNKNRYGNIISYDHS

SEQ ID NO: 6070 - protein, 20 aa, Artificial Sequence
  Description of Artificial Sequence: targeting sequence/synthetic sequence
APKVKDRTHNVTEKVTQVLS

SEQ ID NO: 6071 - protein, 20 aa, Artificial Sequence
  Description of Artificial Sequence: targeting sequence/synthetic sequence
NSINDSKILSLQNKKNALVD

SEQ ID NO: 6072 - protein, 20 aa, Artificial Sequence
  Description of Artificial Sequence: targeting sequence/synthetic sequence
SSRVSPGTRPTAMGSFSSHM

SEQ ID NO: 6073 - protein, 20 aa, Artificial Sequence
  Description of Artificial Sequence: targeting sequence/synthetic sequence
KALAAAGYDVEKNNSRIKLS

SEQ ID NO: 6074 - protein, 20 aa, Artificial Sequence
  Description of Artificial Sequence: targeting sequence/synthetic sequence
IHYDGGAGTNTVSYAALGRQ

SEQ ID NO: 6075 - protein, 20 aa, Artificial Sequence
  Description of Artificial Sequence: targeting sequence/synthetic sequence
QNRIRDSEYEIQRQAKKSFS

SEQ ID NO: 6076 - protein, 20 aa, Artificial Sequence
  Description of Artificial Sequence: targeting sequence/synthetic sequence
AEHNKVVTKDFDVIRNVIKD

SEQ ID NO: 6077 - protein, 20 aa, Artificial Sequence
  Description of Artificial Sequence: targeting sequence/synthetic sequence
KVFLENVIRDAVTYTEHAKR

SEQ ID NO: 6078 - protein, 20 aa, Artificial Sequence
  Description of Artificial Sequence: targeting sequence/synthetic sequence
LPGVGLTPSAAQTARQHPKM

SEQ ID NO: 6079 - protein, 20 aa, Artificial Sequence
  Description of Artificial Sequence: targeting sequence/synthetic sequence
PKVKDRTHNVTEKVTQVLSL

SEQ ID NO: 6080 - protein, 20 aa, Artificial Sequence
  Description of Artificial Sequence: targeting sequence/synthetic sequence
FVTKLKQLEMLENQISTIHQ

SEQ ID NO: 6081 - protein, 20 aa, Artificial Sequence
  Description of Artificial Sequence: targeting sequence/synthetic sequence
IKAINNALKERDEKWKEVYS

SEQ ID NO: 6082 - protein, 20 aa, Artificial Sequence
  Description of Artificial Sequence: targeting sequence/synthetic sequence
IARLEQNGSPLGRGRLGSTG

SEQ ID NO: 6083 - protein, 20 aa, Artificial Sequence
  Description of Artificial Sequence: targeting sequence/synthetic sequence
AKQIQEQLKVPQNGKSYSLK

SEQ ID NO: 6084 - protein, 20 aa, Artificial Sequence
  Description of Artificial Sequence: targeting sequence/synthetic sequence
NPNYKVNVYAVTKENTIINP

SEQ ID NO: 6085 - protein, 20 aa, Artificial Sequence
  Description of Artificial Sequence: targeting sequence/synthetic sequence
ITPDITSKDCPNGHVCYTKT

SEQ ID NO: 6086 - protein, 20 aa, Artificial Sequence
  Description of Artificial Sequence: targeting sequence/synthetic sequence
IIKKASNSRNINNDNIVREG

SEQ ID NO: 6087 - protein, 20 aa, Artificial Sequence
  Description of Artificial Sequence: targeting sequence/synthetic sequence
KGGNSSVKLEAGLANTITSF

SEQ ID NO: 6088 - protein, 20 aa, Artificial Sequence
  Description of Artificial Sequence: targeting sequence/synthetic sequence
LHSNKLTHTDLKPENILFVQ

SEQ ID NO: 6089 - protein, 20 aa, Artificial Sequence
  Description of Artificial Sequence: targeting sequence/synthetic sequence
LNQPHLNKFRDNQISTAKYS

SEQ ID NO: 6090 - protein, 20 aa, Artificial Sequence
  Description of Artificial Sequence: targeting sequence/synthetic sequence
ENAIDGEHSGKATHARIGQI

SEQ ID NO: 6091 - protein, 20 aa, Artificial Sequence
  Description of Artificial Sequence: targeting sequence/synthetic sequence
RKGNYSERVGAGAPVYLAAV

SEQ ID NO: 6092 - protein, 20 aa, Artificial Sequence
  Description of Artificial Sequence: targeting sequence/synthetic sequence
LTGRQDTSRMSTSQIPGRVA

SEQ ID NO: 6093 - protein, 20 aa, Artificial Sequence
  Description of Artificial Sequence: targeting sequence/synthetic sequence
PHMTSENTVLQGYTIPKGTL

SEQ ID NO: 6094 - protein, 20 aa, Artificial Sequence
  Description of Artificial Sequence: targeting sequence/synthetic sequence
YLHENKIIHRDLKPENIVLQ

SEQ ID NO: 6095 - protein, 20 aa, Artificial Sequence
  Description of Artificial Sequence: targeting sequence/synthetic sequence
FAPANTQNNNIEGQAIVYQS

SEQ ID NO: 6096 - protein, 20 aa, Artificial Sequence
  Description of Artificial Sequence: targeting sequence/synthetic sequence
RENAIDGEHSGKATHARIGQ

SEQ ID NO: 6097 - protein, 20 aa, Artificial Sequence
  Description of Artificial Sequence: targeting sequence/synthetic sequence
INGKAIHLVNNESSEVIVHK

SEQ ID NO: 6098 - protein, 20 aa, Artificial Sequence
  Description of Artificial Sequence: targeting sequence/synthetic sequence
FTILRDDSKNSVHLQMNSLK

SEQ ID NO: 6099 - protein, 20 aa, Artificial Sequence
  Description of Artificial Sequence: targeting sequence/synthetic sequence
GIKSLVSKGTLVQTKGTGAS

SEQ ID NO: 6100 - protein, 20 aa, Artificial Sequence
  Description of Artificial Sequence: targeting sequence/synthetic sequence
SSQNRIRDSEYEIQRQAKKS

SEQ ID NO: 6101 - protein, 20 aa, Artificial Sequence
  Description of Artificial Sequence: targeting sequence/synthetic sequence
ISEGYNINNLKVNFRGQNAN

SEQ ID NO: 6102 - protein, 20 aa, Artificial Sequence
  Description of Artificial Sequence: targeting sequence/synthetic sequence
DRVPHSRNSITLTNLTPGTE

SEQ ID NO: 6103 - protein, 20 aa, Artificial Sequence
  Description of Artificial Sequence: targeting sequence/synthetic sequence
GGVAAAVSKTAVAPIERVKL

SEQ ID NO: 6104 - protein, 20 aa, Artificial Sequence
  Description of Artificial Sequence: targeting sequence/synthetic sequence
ELERPGGNEITRGGSTSYGT

SEQ ID NO: 6105 - protein, 20 aa, Artificial Sequence
  Description of Artificial Sequence: targeting sequence/synthetic sequence
IGVLGYQKTVDHTKVNSKLS

SEQ ID NO: 6106 - protein, 20 aa, Artificial Sequence
  Description of Artificial Sequence: targeting sequence/synthetic sequence
TKPPVPSVQKLVEDRWNKPQ

SEQ ID NO: 6107 - protein, 20 aa, Artificial Sequence
  Description of Artificial Sequence: targeting sequence/synthetic sequence
MGAGVAGRITGSMSLASGKS

SEQ ID NO: 6108 - protein, 20 aa, Artificial Sequence
  Description of Artificial Sequence: targeting sequence/synthetic sequence
DAAEHNKVVTKDFDVIRNVI

SEQ ID NO: 6109 - protein, 20 aa, Artificial Sequence
  Description of Artificial Sequence: targeting sequence/synthetic sequence
DVIRNVIKDNATFSRKNPAY

SEQ ID NO: 6110 - protein, 20 aa, Artificial Sequence
  Description of Artificial Sequence: targeting sequence/synthetic sequence
LEGNGIATDVPSATKRWGFR

SEQ ID NO: 6111 - protein, 20 aa, Artificial Sequence
  Description of Artificial Sequence: targeting sequence/synthetic sequence
VGLQVVAVKAPGFGDNRKNQ

SEQ ID NO: 6112 - protein, 20 aa, Artificial Sequence
  Description of Artificial Sequence: targeting sequence/synthetic sequence
VNDIFERIAGEASRLAHYNK

SEQ ID NO: 6113 - protein, 20 aa, Artificial Sequence
  Description of Artificial Sequence: targeting sequence/synthetic sequence
TVTRGDAFLNKNSILSNIHE

SEQ ID NO: 6114 - protein, 20 aa, Artificial Sequence
  Description of Artificial Sequence: targeting sequence/synthetic sequence
GSSQNRIRDSEYEIQRQAKK

SEQ ID NO: 6115 - protein, 20 aa, Artificial Sequence
  Description of Artificial Sequence: targeting sequence/synthetic sequence
SNPNYKVNVYAVTKENTIIN

SEQ ID NO: 6116 - protein, 20 aa, Artificial Sequence
  Description of Artificial Sequence: targeting sequence/synthetic sequence
HRADKGTGSNVILVRSNLPG

SEQ ID NO: 6117 - protein, 20 aa, Artificial Sequence
  Description of Artificial Sequence: targeting sequence/synthetic sequence
VVSSRVSPGTRPTAMGSFSS

SEQ ID NO: 6118 - protein, 20 aa, Artificial Sequence
  Description of Artificial Sequence: targeting sequence/synthetic sequence
DRNPRGSSSRQSSSSAMSSS

SEQ ID NO: 6119 - protein, 20 aa, Artificial Sequence
  Description of Artificial Sequence: targeting sequence/synthetic sequence
FQGSKRGLNSSFETSPKKVK

SEQ ID NO: 6120 - protein, 20 aa, Artificial Sequence
  Description of Artificial Sequence: targeting sequence/synthetic sequence
YDINLVETSSTSAHHSHEQH

SEQ ID NO: 6121 - protein, 20 aa, Artificial Sequence
  Description of Artificial Sequence: targeting sequence/synthetic sequence
GIGMTKADLINNLGTIAKSG

SEQ ID NO: 6122 - protein, 20 aa, Artificial Sequence
  Description of Artificial Sequence: targeting sequence/synthetic sequence
GTHCNQVEVIATLKDGRKIC

SEQ ID NO: 6123 - protein, 20 aa, Artificial Sequence
  Description of Artificial Sequence: targeting sequence/synthetic sequence
RASSVQYDINLVETSSTSAH

SEQ ID NO: 6124 - protein, 20 aa, Artificial Sequence
  Description of Artificial Sequence: targeting sequence/synthetic sequence
FFRENAIDGEHSGKATHARI

SEQ ID NO: 6125 - protein, 20 aa, Artificial Sequence
  Description of Artificial Sequence: targeting sequence/synthetic sequence
YGGVTEHNGNQLDKYRSITV

SEQ ID NO: 6126 - protein, 20 aa, Artificial Sequence
  Description of Artificial Sequence: targeting sequence/synthetic sequence
TISRDNSKNTLSLQMNSLRV

SEQ ID NO: 6127 - protein, 20 aa, Artificial Sequence
  Description of Artificial Sequence: targeting sequence/synthetic sequence
CTSQHLLNRTVTDNMLCAGD

SEQ ID NO: 6128 - protein, 20 aa, Artificial Sequence
  Description of Artificial Sequence: targeting sequence/synthetic sequence
PSSAGSWNSGSSGPGSTGNR

SEQ ID NO: 6129 - protein, 20 aa, Artificial Sequence
  Description of Artificial Sequence: targeting sequence/synthetic sequence
ENLAKLIQHANVQAHSSLIR

SEQ ID NO: 6130 - protein, 20 aa, Artificial Sequence
  Description of Artificial Sequence: targeting sequence/synthetic sequence
LIPTSGTDTTVTKPKSRIFG

SEQ ID NO: 6131 - protein, 20 aa, Artificial Sequence
  Description of Artificial Sequence: targeting sequence/synthetic sequence
QSKIGSLDNITHVPGGGNKK

SEQ ID NO: 6132 - protein, 20 aa, Artificial Sequence
  Description of Artificial Sequence: targeting sequence/synthetic sequence
ARPVTRSPGGSQEQRAKTPQ

SEQ ID NO: 6133 - protein, 20 aa, Artificial Sequence
  Description of Artificial Sequence: targeting sequence/synthetic sequence
YHSMPTYLNSLNNAILRANL

SEQ ID NO: 6134 - protein, 20 aa, Artificial Sequence
  Description of Artificial Sequence: targeting sequence/synthetic sequence
RFAGIDGTSTYTSGDQKTIK

SEQ ID NO: 6135 - protein, 20 aa, Artificial Sequence
  Description of Artificial Sequence: targeting sequence/synthetic sequence
KAGPAQTLIRPQDMKGASRS

SEQ ID NO: 6136 - protein, 20 aa, Artificial Sequence
  Description of Artificial Sequence: targeting sequence/synthetic sequence
QNGSPLGRGRLGSTGAKMQG

SEQ ID NO: 6137 - protein, 20 aa, Artificial Sequence
  Description of Artificial Sequence: targeting sequence/synthetic sequence
RGDAFLNKNSILSNIHEVHQ

SEQ ID NO: 6138 - protein, 20 aa, Artificial Sequence
  Description of Artificial Sequence: targeting sequence/synthetic sequence
LSRVNAAVANRDSANGFINK

SEQ ID NO: 6139 - protein, 20 aa, Artificial Sequence
  Description of Artificial Sequence: targeting sequence/synthetic sequence
NKNTALDKNYLLNNKIPSNN

SEQ ID NO: 6140 - protein, 20 aa, Artificial Sequence
  Description of Artificial Sequence: targeting sequence/synthetic sequence
NGKAIHLVNNESSEVIVHKA

SEQ ID NO: 6141 - protein, 20 aa, Artificial Sequence
  Description of Artificial Sequence: targeting sequence/synthetic sequence
TKADLINNLGTIAKSGTKAF

SEQ ID NO: 6142 - protein, 20 aa, Artificial Sequence
  Description of Artificial Sequence: targeting sequence/synthetic sequence
KNTALDKNYLLNNKIPSNNV

SEQ ID NO: 6143 - protein, 20 aa, Artificial Sequence
  Description of Artificial Sequence: targeting sequence/synthetic sequence
LKEVLEYNAIGGKYNRGLTV

SEQ ID NO: 6144 - protein, 20 aa, Artificial Sequence
  Description of Artificial Sequence: targeting sequence/synthetic sequence
SSAGSWNSGSSGPGSTGNRN

SEQ ID NO: 6145 - protein, 20 aa, Artificial Sequence
  Description of Artificial Sequence: targeting sequence/synthetic sequence
PVVSSRVSPGTRPTAMGSFS

SEQ ID NO: 6146 - protein, 20 aa, Artificial Sequence
  Description of Artificial Sequence: targeting sequence/synthetic sequence
AAGNLKKALLIQGSNDVEIR

SEQ ID NO: 6147 - protein, 20 aa, Artificial Sequence
  Description of Artificial Sequence: targeting sequence/synthetic sequence
NGSPLGRGRLGSTGAKMQGV

SEQ ID NO: 6148 - protein, 20 aa, Artificial Sequence
  Description of Artificial Sequence: targeting sequence/synthetic sequence
SMTYSTERKTNSLPLHSVKS

SEQ ID NO: 6149 - protein, 20 aa, Artificial Sequence
  Description of Artificial Sequence: targeting sequence/synthetic sequence
GSPLGRGRLGSTGAKMQGVP

SEQ ID NO: 6150 - protein, 20 aa, Artificial Sequence
  Description of Artificial Sequence: targeting sequence/synthetic sequence
GLQVVAVKAPGFGDNRKNQL

SEQ ID NO: 6151 - protein, 20 aa, Artificial Sequence
  Description of Artificial Sequence: targeting sequence/synthetic sequence
QVDNYGTQLNAVNNSLTPQS

SEQ ID NO: 6152 - protein, 20 aa, Artificial Sequence
  Description of Artificial Sequence: targeting sequence/synthetic sequence
IVARPVYSTNAFEENHKKTG

SEQ ID NO: 6153 - protein, 20 aa, Artificial Sequence
  Description of Artificial Sequence: targeting sequence/synthetic sequence
PSVQKLVEDRWNKPQKTTGH

SEQ ID NO: 6154 - protein, 20 aa, Artificial Sequence
  Description of Artificial Sequence: targeting sequence/synthetic sequence
HWGQRALQGAQAVAAAQRLV

SEQ ID NO: 6155 - protein, 20 aa, Artificial Sequence
  Description of Artificial Sequence: targeting sequence/synthetic sequence
GGVLPNIQAVLLPKKTESHK

SEQ ID NO: 6156 - protein, 20 aa, Artificial Sequence
  Description of Artificial Sequence: targeting sequence/synthetic sequence
EGYNINNLKVNFRGQNANLN

SEQ ID NO: 6157 - protein, 20 aa, Artificial Sequence
  Description of Artificial Sequence: targeting sequence/synthetic sequence
RKGGNSSVKLEAGLANTITS

SEQ ID NO: 6158 - protein, 20 aa, Artificial Sequence
  Description of Artificial Sequence: targeting sequence/synthetic sequence
KASNSRNINNDNIVREGDYI

SEQ ID NO: 6159 - protein, 20 aa, Artificial Sequence
  Description of Artificial Sequence: targeting sequence/synthetic sequence
FLENVIRDAVTYTEHAKRKT

SEQ ID NO: 6160 - protein, 20 aa, Artificial Sequence
  Description of Artificial Sequence: targeting sequence/synthetic sequence
KQIQEQLKVPQNGKSYSLKA

SEQ ID NO: 6161 - protein, 20 aa, Artificial Sequence
  Description of Artificial Sequence: targeting sequence/synthetic sequence
LAAAGYDVEKNNSRIKLSLK

SEQ ID NO: 6162 - protein, 20 aa, Artificial Sequence
  Description of Artificial Sequence: targeting sequence/synthetic sequence
SGQGQQAQTPTGKQTDKTKS

SEQ ID NO: 6163 - protein, 20 aa, Artificial Sequence
  Description of Artificial Sequence: targeting sequence/synthetic sequence
RIHYDGGAGTNTVSYAALGR

SEQ ID NO: 6164 - protein, 20 aa, Artificial Sequence
  Description of Artificial Sequence: targeting sequence/synthetic sequence
AVDSAVYGVQRGAKKPLERV

SEQ ID NO: 6165 - protein, 20 aa, Artificial Sequence
  Description of Artificial Sequence: targeting sequence/synthetic sequence
KPPVPSVQKLVEDRWNKPQK

SEQ ID NO: 6166 - protein, 20 aa, Artificial Sequence
  Description of Artificial Sequence: targeting sequence/synthetic sequence
AARPVTRSPGGSQEQRAKTP

SEQ ID NO: 6167 - protein, 20 aa, Artificial Sequence
  Description of Artificial Sequence: targeting sequence/synthetic sequence
LQGKPLQSWGRGSAGGNAHS

SEQ ID NO: 6168 - protein, 20 aa, Artificial Sequence
  Description of Artificial Sequence: targeting sequence/synthetic sequence
TDYGNFLANHTNPLTVSKID

SEQ ID NO: 6169 - protein, 20 aa, Artificial Sequence
  Description of Artificial Sequence: targeting sequence/synthetic sequence
RVPHSRNSITLTNLTPGTEY

SEQ ID NO: 6170 - protein, 20 aa, Artificial Sequence
  Description of Artificial Sequence: targeting sequence/synthetic sequence
PGGCQISGRGARGCNGIPGA

SEQ ID NO: 6171 - protein, 20 aa, Artificial Sequence
  Description of Artificial Sequence: targeting sequence/synthetic sequence
NFLHSNKLTHTDLKPENILF

SEQ ID NO: 6172 - protein, 20 aa, Artificial Sequence
  Description of Artificial Sequence: targeting sequence/synthetic sequence
NLKKALLIQGSNDVEIRAEG

SEQ ID NO: 6173 - protein, 20 aa, Artificial Sequence
  Description of Artificial Sequence: targeting sequence/synthetic sequence
NQLLKGVTIASGGVLPRIHP

SEQ ID NO: 6174 - protein, 20 aa, Artificial Sequence
  Description of Artificial Sequence: targeting sequence/synthetic sequence
PGVGLTPSAAQTARQHPKMH

SEQ ID NO: 6175 - protein, 20 aa, Artificial Sequence
  Description of Artificial Sequence: targeting sequence/synthetic sequence
SKIGSLDNITHVPGGGNKKI

SEQ ID NO: 6176 - protein, 20 aa, Artificial Sequence
  Description of Artificial Sequence: targeting sequence/synthetic sequence
YVRDKEVNSQVYSRLTARGT

SEQ ID NO: 6177 - protein, 20 aa, Artificial Sequence
  Description of Artificial Sequence: targeting sequence/synthetic sequence
GVGLTPSAAQTARQHPKMHL

SEQ ID NO: 6178 - protein, 20 aa, Artificial Sequence
  Description of Artificial Sequence: targeting sequence/synthetic sequence
RARLLPHANEVSQKIGDNLR

SEQ ID NO: 6179 - protein, 20 aa, Artificial Sequence
  Description of Artificial Sequence: targeting sequence/synthetic sequence
YHNYTQPRGNFIPYANEERR

SEQ ID NO: 6180 - protein, 20 aa, Artificial Sequence
  Description of Artificial Sequence: targeting sequence/synthetic sequence
QPHLNKFRDNQISTAKYSVL

SEQ ID NO: 6181 - protein, 20 aa, Artificial Sequence
  Description of Artificial Sequence: targeting sequence/synthetic sequence
KVTIAQGGVLPNIQAVLLPK

SEQ ID NO: 6182 - protein, 20 aa, Artificial Sequence
  Description of Artificial Sequence: targeting sequence/synthetic sequence
GGCQISGRGARGCNGIPGAA

SEQ ID NO: 6183 - protein, 20 aa, Artificial Sequence
  Description of Artificial Sequence: targeting sequence/synthetic sequence
SQGNLIFGKGTKLSVKPNIQ

SEQ ID NO: 6184 - protein, 20 aa, Artificial Sequence
  Description of Artificial Sequence: targeting sequence/synthetic sequence
ESPGIVSNYNNSILARVYRD

SEQ ID NO: 6185 - protein, 20 aa, Artificial Sequence
  Description of Artificial Sequence: targeting sequence/synthetic sequence
SPLGRGRLGSTGAKMQGVPL

SEQ ID NO: 6186 - protein, 20 aa, Artificial Sequence
  Description of Artificial Sequence: targeting sequence/synthetic sequence
VINNAILRANLQKGENPSHY

SEQ ID NO: 6187 - protein, 20 aa, Artificial Sequence
  Description of Artificial Sequence: targeting sequence/synthetic sequence
HGLYGAKGITTKYTITQKQN

SEQ ID NO: 6188 - protein, 20 aa, Artificial Sequence
  Description of Artificial Sequence: targeting sequence/synthetic sequence
LNNAILRANLPKSKGNPAAY

SEQ ID NO: 6189 - protein, 20 aa, Artificial Sequence
  Description of Artificial Sequence: targeting sequence/synthetic sequence
ILELAGNAARDNKKTRIIPR

SEQ ID NO: 6190 - protein, 20 aa, Artificial Sequence
  Description of Artificial Sequence: targeting sequence/synthetic sequence
NPRGSSSRQSSSSAMSSSSA

SEQ ID NO: 6191 - protein, 20 aa, Artificial Sequence
  Description of Artificial Sequence: targeting sequence/synthetic sequence
NNFIDRRKDSTLSINNIRST

SEQ ID NO: 6192 - protein, 20 aa, Artificial Sequence
  Description of Artificial Sequence: targeting sequence/synthetic sequence
HRDCDKPPDKGNCGPVRRAF

SEQ ID NO: 6193 - protein, 20 aa, Artificial Sequence
  Description of Artificial Sequence: targeting sequence/synthetic sequence
HSNKLTHTDLKPENILFVQS

SEQ ID NO: 6194 - protein, 20 aa, Artificial Sequence
  Description of Artificial Sequence: targeting sequence/synthetic sequence
GNLIFGKGTKLSVKPNIQNP

SEQ ID NO: 6195 - protein, 20 aa, Artificial Sequence
  Description of Artificial Sequence: targeting sequence/synthetic sequence
RHLQLAIRNDEELNKLLGKV

SEQ ID NO: 6196 - protein, 20 aa, Artificial Sequence
  Description of Artificial Sequence: targeting sequence/synthetic sequence
HAVGNHRSFSDKNGLTSKRE

SEQ ID NO: 6197 - protein, 20 aa, Artificial Sequence
  Description of Artificial Sequence: targeting sequence/synthetic sequence
TPRGAAPPGQKGQANATRIP

SEQ ID NO: 6198 - protein, 20 aa, Artificial Sequence
  Description of Artificial Sequence: targeting sequence/synthetic sequence
LLIPTSGTDTTVTKPKSRIF

SEQ ID NO: 6199 - protein, 20 aa, Artificial Sequence
  Description of Artificial Sequence: targeting sequence/synthetic sequence
RLVTTGVLKQTKGVGASGSF

SEQ ID NO: 6200 - protein, 20 aa, Artificial Sequence
  Description of Artificial Sequence: targeting sequence/synthetic sequence
VTIAQGGVLPNIQAVLLPKK

SEQ ID NO: 6201 - protein, 20 aa, Artificial Sequence
  Description of Artificial Sequence: targeting sequence/synthetic sequence
VTKLTEDRWNERQKTQGHRG

SEQ ID NO: 6202 - protein, 20 aa, Artificial Sequence
  Description of Artificial Sequence: targeting sequence/synthetic sequence
RKVIKDNATFSTKNPAYPIS

SEQ ID NO: 6203 - protein, 20 aa, Artificial Sequence
  Description of Artificial Sequence: targeting sequence/synthetic sequence
VTRGDAFLNKNSILSNIHEV

SEQ ID NO: 6204 - protein, 20 aa, Artificial Sequence
  Description of Artificial Sequence: targeting sequence/synthetic sequence
LYVGKKQLVEIEKVVLHPNY

SEQ ID NO: 6205 - protein, 20 aa, Artificial Sequence
  Description of Artificial Sequence: targeting sequence/synthetic sequence
LQTTDYGNFLANHTNPLTVS

SEQ ID NO: 6206 - protein, 20 aa, Artificial Sequence
  Description of Artificial Sequence: targeting sequence/synthetic sequence
HSMPTYLNSLNNAILRANLP

SEQ ID NO: 6207 - protein, 20 aa, Artificial Sequence
  Description of Artificial Sequence: targeting sequence/synthetic sequence
SIHRADKGTGSNVILVRSNL

SEQ ID NO: 6208 - protein, 20 aa, Artificial Sequence
  Description of Artificial Sequence: targeting sequence/synthetic sequence
TIVTRINDISHTQSVSSKQK

SEQ ID NO: 6209 - protein, 20 aa, Artificial Sequence
  Description of Artificial Sequence: targeting sequence/synthetic sequence
AGKEGGKGPRGETGPAGRPG

SEQ ID NO: 6210 - protein, 20 aa, Artificial Sequence
  Description of Artificial Sequence: targeting sequence/synthetic sequence
LRKGNYSERVGAGAPVYLAA

SEQ ID NO: 6211 - protein, 20 aa, Artificial Sequence
  Description of Artificial Sequence: targeting sequence/synthetic sequence
IYLNQPHLNKFRDNQISTAK

SEQ ID NO: 6212 - protein, 20 aa, Artificial Sequence
  Description of Artificial Sequence: targeting sequence/synthetic sequence
QPRGNFIPYANEERREYRLR

SEQ ID NO: 6213 - protein, 20 aa, Artificial Sequence
  Description of Artificial Sequence: targeting sequence/synthetic sequence
VRASLAEETRGARKGYPASP

SEQ ID NO: 6214 - protein, 20 aa, Artificial Sequence
  Description of Artificial Sequence: targeting sequence/synthetic sequence
KLLGRVTIAQGGVLPNIQAV

SEQ ID NO: 6215 - protein, 20 aa, Artificial Sequence
  Description of Artificial Sequence: targeting sequence/synthetic sequence
NFIDRRKDSTLSINNIRSTI

SEQ ID NO: 6216 - protein, 20 aa, Artificial Sequence
  Description of Artificial Sequence: targeting sequence/synthetic sequence
GTKPGYVDSIQKGIQKPKSG

SEQ ID NO: 6217 - protein, 20 aa, Artificial Sequence
  Description of Artificial Sequence: targeting sequence/synthetic sequence
NKLATNLIKSGVATKGLNVH

SEQ ID NO: 6218 - protein, 20 aa, Artificial Sequence
  Description of Artificial Sequence: targeting sequence/synthetic sequence
IKTIDNALTKRNEKWSDMYG

SEQ ID NO: 6219 - protein, 20 aa, Artificial Sequence
  Description of Artificial Sequence: targeting sequence/synthetic sequence
GVLPNIQAVLLPKKTESHKA

SEQ ID NO: 6220 - protein, 20 aa, Artificial Sequence
  Description of Artificial Sequence: targeting sequence/synthetic sequence
GVTEHNGNQLDKYRSITVRV

SEQ ID NO: 6221 - protein, 20 aa, Artificial Sequence
  Description of Artificial Sequence: targeting sequence/synthetic sequence
ISKTKGQPREPQVYTLPPSR

SEQ ID NO: 6222 - protein, 20 aa, Artificial Sequence
  Description of Artificial Sequence: targeting sequence/synthetic sequence
VSSRVSPGTRPTAMGSFSSH

SEQ ID NO: 6223 - protein, 20 aa, Artificial Sequence
  Description of Artificial Sequence: targeting sequence/synthetic sequence
LYGAKGITTKYTITQKQNPL

SEQ ID NO: 6224 - protein, 20 aa, Artificial Sequence
  Description of Artificial Sequence: targeting sequence/synthetic sequence
KIATPRGAAPPGQKGQANAT

SEQ ID NO: 6225 - protein, 20 aa, Artificial Sequence
  Description of Artificial Sequence: targeting sequence/synthetic sequence
QSWGRGSAGGNAHSPLGVPG

SEQ ID NO: 6226 - protein, 20 aa, Artificial Sequence
  Description of Artificial Sequence: targeting sequence/synthetic sequence
SQMQSQAGGNNTGSTPLRKA

SEQ ID NO: 6227 - protein, 20 aa, Artificial Sequence
  Description of Artificial Sequence: targeting sequence/synthetic sequence
DENRNKNRYGNIISYDHSRV

SEQ ID NO: 6228 - protein, 20 aa, Artificial Sequence
  Description of Artificial Sequence: targeting sequence/synthetic sequence
ESNNVITFNGLANSSSYHTF

SEQ ID NO: 6229 - protein, 20 aa, Artificial Sequence
  Description of Artificial Sequence: targeting sequence/synthetic sequence
KTKPPVPSVQKLVEDRWNKP

SEQ ID NO: 6230 - protein, 20 aa, Artificial Sequence
  Description of Artificial Sequence: targeting sequence/synthetic sequence
QMESMTYSTERKTNSLPLHS

SEQ ID NO: 6231 - protein, 20 aa, Artificial Sequence
  Description of Artificial Sequence: targeting sequence/synthetic sequence
GAILSSTNVGSNTYGKRNAV

SEQ ID NO: 6232 - protein, 20 aa, Artificial Sequence
  Description of Artificial Sequence: targeting sequence/synthetic sequence
YLMGMGNEIDLHTVHFHGHS

SEQ ID NO: 6233 - protein, 20 aa, Artificial Sequence
  Description of Artificial Sequence: targeting sequence/synthetic sequence
VRDKEVNSQVYSRLTARGTV

SEQ ID NO: 6234 - protein, 20 aa, Artificial Sequence
  Description of Artificial Sequence: targeting sequence/synthetic sequence
LPFDNIVGKQNTLAALTRNS

SEQ ID NO: 6235 - protein, 20 aa, Artificial Sequence
  Description of Artificial Sequence: targeting sequence/synthetic sequence
QGNLIFGKGTKLSVKPNIQN

SEQ ID NO: 6236 - protein, 20 aa, Artificial Sequence
  Description of Artificial Sequence: targeting sequence/synthetic sequence
LAKIPSENNKLTYSHGNYLF

SEQ ID NO: 6237 - protein, 20 aa, Artificial Sequence
  Description of Artificial Sequence: targeting sequence/synthetic sequence
TTDYGNFLANHTNPLTVSKI

SEQ ID NO: 6238 - protein, 20 aa, Artificial Sequence
  Description of Artificial Sequence: targeting sequence/synthetic sequence
DKEVNSQVYSRLTARGTVKV

SEQ ID NO: 6239 - protein, 20 aa, Artificial Sequence
  Description of Artificial Sequence: targeting sequence/synthetic sequence
EANIRGQGGLAYPGVRTHGT

SEQ ID NO: 6240 - protein, 20 aa, Artificial Sequence
  Description of Artificial Sequence: targeting sequence/synthetic sequence
SRVSPGTRPTAMGSFSSHMT

SEQ ID NO: 6241 - protein, 20 aa, Artificial Sequence
  Description of Artificial Sequence: targeting sequence/synthetic sequence
FFFRENAIDGEHSGKATHAR

SEQ ID NO: 6242 - protein, 20 aa, Artificial Sequence
  Description of Artificial Sequence: targeting sequence/synthetic sequence
GPHAVGNHRSFSDKNGLTSK

SEQ ID NO: 6243 - protein, 20 aa, Artificial Sequence
  Description of Artificial Sequence: targeting sequence/synthetic sequence
GVLGYQKTVDHTKVNSKLSL

SEQ ID NO: 6244 - protein, 20 aa, Artificial Sequence
  Description of Artificial Sequence: targeting sequence/synthetic sequence
QLITNSVEMHAYTVQRLYKA

SEQ ID NO: 6245 - protein, 20 aa, Artificial Sequence
  Description of Artificial Sequence: targeting sequence/synthetic sequence
SSKSTIFSGNGRNVVVEPIY

SEQ ID NO: 6246 - protein, 20 aa, Artificial Sequence
  Description of Artificial Sequence: targeting sequence/synthetic sequence
TNLIKSGVATKGLNVHGKSS

SEQ ID NO: 6247 - protein, 20 aa, Artificial Sequence
  Description of Artificial Sequence: targeting sequence/synthetic sequence
SSYTTLQRVAGISRTGMQIN

SEQ ID NO: 6248 - protein, 20 aa, Artificial Sequence
  Description of Artificial Sequence: targeting sequence/synthetic sequence
QGSKRGLNSSFETSPKKVKW

SEQ ID NO: 6249 - protein, 20 aa, Artificial Sequence
  Description of Artificial Sequence: targeting sequence/synthetic sequence
KISSSGNRFNQVVVMNSVGN

SEQ ID NO: 6250 - protein, 20 aa, Artificial Sequence
  Description of Artificial Sequence: targeting sequence/synthetic sequence
TKDFDVIRNVIKDNATFSRK

SEQ ID NO: 6251 - protein, 20 aa, Artificial Sequence
  Description of Artificial Sequence: targeting sequence/synthetic sequence
GAAPPGQKGQANATRIPAKT

SEQ ID NO: 6252 - protein, 20 aa, Artificial Sequence
  Description of Artificial Sequence: targeting sequence/synthetic sequence
NAILRANLPKSKGNPAAYGI

SEQ ID NO: 6253 - protein, 20 aa, Artificial Sequence
  Description of Artificial Sequence: targeting sequence/synthetic sequence
NLAKLIQHANVQAHSSLIRN

SEQ ID NO: 6254 - protein, 20 aa, Artificial Sequence
  Description of Artificial Sequence: targeting sequence/synthetic sequence
GQRALQGAQAVAAAQRLVHA

SEQ ID NO: 6255 - protein, 20 aa, Artificial Sequence
  Description of Artificial Sequence: targeting sequence/synthetic sequence
YHGTKPGYVDSIQKGIQKPK

SEQ ID NO: 6256 - protein, 20 aa, Artificial Sequence
  Description of Artificial Sequence: targeting sequence/synthetic sequence
GVAGRITGSMSLASGKSLLH

SEQ ID NO: 6257 - protein, 20 aa, Artificial Sequence
  Description of Artificial Sequence: targeting sequence/synthetic sequence
QGKPLQSWGRGSAGGNAHSP

SEQ ID NO: 6258 - protein, 20 aa, Artificial Sequence
  Description of Artificial Sequence: targeting sequence/synthetic sequence
TPDITSKDCPNGHVCYTKTW

SEQ ID NO: 6259 - protein, 20 aa, Artificial Sequence
  Description of Artificial Sequence: targeting sequence/synthetic sequence
KLYKTYATKEGIPKSNRSHL

SEQ ID NO: 6260 - protein, 20 aa, Artificial Sequence
  Description of Artificial Sequence: targeting sequence/synthetic sequence
LSTNKLENQLLLQRQKLQQL

SEQ ID NO: 6261 - protein, 20 aa, Artificial Sequence
  Description of Artificial Sequence: targeting sequence/synthetic sequence
LNEFRFSQVSKNDLYHAGEL

SEQ ID NO: 6262 - protein, 20 aa, Artificial Sequence
  Description of Artificial Sequence: targeting sequence/synthetic sequence
EKGSQLAAGQKQRLAIARAL

SEQ ID NO: 6263 - protein, 20 aa, Artificial Sequence
  Description of Artificial Sequence: targeting sequence/synthetic sequence
YSTERKTNSLPLHSVKSIKS

SEQ ID NO: 6264 - protein, 20 aa, Artificial Sequence
  Description of Artificial Sequence: targeting sequence/synthetic sequence
AHKVEHESRTQNGRSFQRTG

SEQ ID NO: 6265 - protein, 20 aa, Artificial Sequence
  Description of Artificial Sequence: targeting sequence/synthetic sequence
GITKPAIRRLARRGGVKRIS

SEQ ID NO: 6266 - protein, 20 aa, Artificial Sequence
  Description of Artificial Sequence: targeting sequence/synthetic sequence
KEVLEYNAIGGKYNRGLTVV

SEQ ID NO: 6267 - protein, 20 aa, Artificial Sequence
  Description of Artificial Sequence: targeting sequence/synthetic sequence
ATNQFGTAKNTGSLIVKERT

SEQ ID NO: 6268 - protein, 20 aa, Artificial Sequence
  Description of Artificial Sequence: targeting sequence/synthetic sequence
YGAKGITTKYTITQKQNPLI

SEQ ID NO: 6269 - protein, 20 aa, Artificial Sequence
  Description of Artificial Sequence: targeting sequence/synthetic sequence
TIAQGGVLPNIQAVLLPKKT

SEQ ID NO: 6270 - protein, 20 aa, Artificial Sequence
  Description of Artificial Sequence: targeting sequence/synthetic sequence
PFDNIVGKQNTLAALTRNSI

SEQ ID NO: 6271 - protein, 20 aa, Artificial Sequence
  Description of Artificial Sequence: targeting sequence/synthetic sequence
SVTKLTEDRWNERQKTQGHR

SEQ ID NO: 6272 - protein, 20 aa, Artificial Sequence
  Description of Artificial Sequence: targeting sequence/synthetic sequence
QYIVARPVYSTNAFEENHKK

SEQ ID NO: 6273 - protein, 20 aa, Artificial Sequence
  Description of Artificial Sequence: targeting sequence/synthetic sequence
QKQLLNENNNTGIIKGHYNR

SEQ ID NO: 6274 - protein, 20 aa, Artificial Sequence
  Description of Artificial Sequence: targeting sequence/synthetic sequence
NNMIQTKPTGTQQSTNTAVT

SEQ ID NO: 6275 - protein, 20 aa, Artificial Sequence
  Description of Artificial Sequence: targeting sequence/synthetic sequence
IRKVIKDNATFSTKNPAYPI

SEQ ID NO: 6276 - protein, 20 aa, Artificial Sequence
  Description of Artificial Sequence: targeting sequence/synthetic sequence
KAINNALKERDEKWKEVYSF

SEQ ID NO: 6277 - protein, 20 aa, Artificial Sequence
  Description of Artificial Sequence: targeting sequence/synthetic sequence
IHRADKGTGSNVILVRSNLP

SEQ ID NO: 6278 - protein, 20 aa, Artificial Sequence
  Description of Artificial Sequence: targeting sequence/synthetic sequence
IGHLLKDKYENSIQISDKTK

SEQ ID NO: 6279 - protein, 20 aa, Artificial Sequence
  Description of Artificial Sequence: targeting sequence/synthetic sequence
NINNLKVNFRGQNANLNPRI

SEQ ID NO: 6280 - protein, 20 aa, Artificial Sequence
  Description of Artificial Sequence: targeting sequence/synthetic sequence
KTKPPLPSVQKLVEDRWNKP

SEQ ID NO: 6281 - protein, 20 aa, Artificial Sequence
  Description of Artificial Sequence: targeting sequence/synthetic sequence
RQKQLLNENNNTGIIKGHYN

SEQ ID NO: 6282 - protein, 20 aa, Artificial Sequence
  Description of Artificial Sequence: targeting sequence/synthetic sequence
KPLQSWGRGSAGGNAHSPLG

SEQ ID NO: 6283 - protein, 20 aa, Artificial Sequence
  Description of Artificial Sequence: targeting sequence/synthetic sequence
TKIATPRGAAPPGQKGQANA

SEQ ID NO: 6284 - protein, 20 aa, Artificial Sequence
  Description of Artificial Sequence: targeting sequence/synthetic sequence
IATNQFGTAKNTGSLIVKER

SEQ ID NO: 6285 - protein, 20 aa, Artificial Sequence
  Description of Artificial Sequence: targeting sequence/synthetic sequence
TNKEKTIKISSSGNRFNQVV

SEQ ID NO: 6286 - protein, 20 aa, Artificial Sequence
  Description of Artificial Sequence: targeting sequence/synthetic sequence
TTVTRGDAFLNKNSILSNIH

SEQ ID NO: 6287 - protein, 20 aa, Artificial Sequence
  Description of Artificial Sequence: targeting sequence/synthetic sequence
LAGSLQGKPLQSWGRGSAGG

SEQ ID NO: 6288 - protein, 20 aa, Artificial Sequence
  Description of Artificial Sequence: targeting sequence/synthetic sequence
NKRKEQMYQALQNQVNAIKT

SEQ ID NO: 6289 - protein, 20 aa, Artificial Sequence
  Description of Artificial Sequence: targeting sequence/synthetic sequence
NTQFNKRKEQMYQALQNQVN

SEQ ID NO: 6290 - protein, 20 aa, Artificial Sequence
  Description of Artificial Sequence: targeting sequence/synthetic sequence
RLKEVLEYNAIGGKYNRGLT

SEQ ID NO: 6291 - protein, 20 aa, Artificial Sequence
  Description of Artificial Sequence: targeting sequence/synthetic sequence
FGSDSKAVTGLRTIDGKKYY

SEQ ID NO: 6292 - protein, 20 aa, Artificial Sequence
  Description of Artificial Sequence: targeting sequence/synthetic sequence
MKEANIRGQGGLAYPGVRTH

SEQ ID NO: 6293 - protein, 20 aa, Artificial Sequence
  Description of Artificial Sequence: targeting sequence/synthetic sequence
STNKLENQLLLQRQKLQQLQ

SEQ ID NO: 6294 - protein, 20 aa, Artificial Sequence
  Description of Artificial Sequence: targeting sequence/synthetic sequence
GRPREDRVPHSRNSITLTNL

SEQ ID NO: 6295 - protein, 20 aa, Artificial Sequence
  Description of Artificial Sequence: targeting sequence/synthetic sequence
RASLAEETRGARKGYPASPN

SEQ ID NO: 6296 - protein, 20 aa, Artificial Sequence
  Description of Artificial Sequence: targeting sequence/synthetic sequence
HKVEHESRTQNGRSFQRTGT

SEQ ID NO: 6297 - protein, 20 aa, Artificial Sequence
  Description of Artificial Sequence: targeting sequence/synthetic sequence
KPNNFIDRRKDSTLSINNIR

SEQ ID NO: 6298 - protein, 20 aa, Artificial Sequence
  Description of Artificial Sequence: targeting sequence/synthetic sequence
ALAAVDSAVYGVQRGAKKPL

SEQ ID NO: 6299 - protein, 20 aa, Artificial Sequence
  Description of Artificial Sequence: targeting sequence/synthetic sequence
SLQGKPLQSWGRGSAGGNAH

SEQ ID NO: 6300 - protein, 20 aa, Artificial Sequence
  Description of Artificial Sequence: targeting sequence/synthetic sequence
TQFNKRKEQMYQALQNQVNA

SEQ ID NO: 6301 - protein, 20 aa, Artificial Sequence
  Description of Artificial Sequence: targeting sequence/synthetic sequence
GHLLKDKYENSIQISDKTKR

SEQ ID NO: 6302 - protein, 20 aa, Artificial Sequence
  Description of Artificial Sequence: targeting sequence/synthetic sequence
NKRKEQMYQALQNQVNALKA

SEQ ID NO: 6303 - protein, 20 aa, Artificial Sequence
  Description of Artificial Sequence: targeting sequence/synthetic sequence
SGRPREDRVPHSRNSITLTN

SEQ ID NO: 6304 - protein, 20 aa, Artificial Sequence
  Description of Artificial Sequence: targeting sequence/synthetic sequence
ANIRGQGGLAYPGVRTHGTL

SEQ ID NO: 6305 - protein, 20 aa, Artificial Sequence
  Description of Artificial Sequence: targeting sequence/synthetic sequence
RRRFVQNALNGNGDSNNMDR

SEQ ID NO: 6306 - protein, 20 aa, Artificial Sequence
  Description of Artificial Sequence: targeting sequence/synthetic sequence
TRINDISHTQSVSSKQKVTG

SEQ ID NO: 6307 - protein, 20 aa, Artificial Sequence
  Description of Artificial Sequence: targeting sequence/synthetic sequence
THCNQVEVIATLKDGRKICL

SEQ ID NO: 6308 - protein, 20 aa, Artificial Sequence
  Description of Artificial Sequence: targeting sequence/synthetic sequence
QMPETFLSTNKLENQLLLQR

SEQ ID NO: 6309 - protein, 20 aa, Artificial Sequence
  Description of Artificial Sequence: targeting sequence/synthetic sequence
SRCTSQHLLNRTVTDNMLCA

SEQ ID NO: 6310 - protein, 20 aa, Artificial Sequence
  Description of Artificial Sequence: targeting sequence/synthetic sequence
WDVDIANKLESGGIPGRIHI

SEQ ID NO: 6311 - protein, 20 aa, Artificial Sequence
  Description of Artificial Sequence: targeting sequence/synthetic sequence
AKIPSENNKLTYSHGNYLFH

SEQ ID NO: 6312 - protein, 20 aa, Artificial Sequence
  Description of Artificial Sequence: targeting sequence/synthetic sequence
TLKSLSQQIENIRSPEGSRK

SEQ ID NO: 6313 - protein, 20 aa, Artificial Sequence
  Description of Artificial Sequence: targeting sequence/synthetic sequence
MGNEIDLHTVHFHGHSFQYK

SEQ ID NO: 6314 - protein, 20 aa, Artificial Sequence
  Description of Artificial Sequence: targeting sequence/synthetic sequence
GNSIGIGEPSEPSELLRTKA

SEQ ID NO: 6315 - protein, 20 aa, Artificial Sequence
  Description of Artificial Sequence: targeting sequence/synthetic sequence
GIDGTSTYTSGDQKTIKSTR

SEQ ID NO: 6316 - protein, 20 aa, Artificial Sequence
  Description of Artificial Sequence: targeting sequence/synthetic sequence
LRGVRHNSSLLQDQQHSLRQ

SEQ ID NO: 6317 - protein, 20 aa, Artificial Sequence
  Description of Artificial Sequence: targeting sequence/synthetic sequence
KRKEQMYQALQNQVNALKAI

SEQ ID NO: 6318 - protein, 20 aa, Artificial Sequence
  Description of Artificial Sequence: targeting sequence/synthetic sequence
LNGFRFSRLTTNDLYHAGEL

SEQ ID NO: 6319 - protein, 20 aa, Artificial Sequence
  Description of Artificial Sequence: targeting sequence/synthetic sequence
VWSWDVDIANKLESGGIPGR

SEQ ID NO: 6320 - protein, 20 aa, Artificial Sequence
  Description of Artificial Sequence: targeting sequence/synthetic sequence
FNIGNLAVNNRGQSIKLNPK

SEQ ID NO: 6321 - protein, 20 aa, Artificial Sequence
  Description of Artificial Sequence: targeting sequence/synthetic sequence
FRFSQVSKNDLYHAGELLAL

SEQ ID NO: 6322 - protein, 20 aa, Artificial Sequence
  Description of Artificial Sequence: targeting sequence/synthetic sequence
FDVIRNVIKDNATFSRKNPA

SEQ ID NO: 6323 - protein, 20 aa, Artificial Sequence
  Description of Artificial Sequence: targeting sequence/synthetic sequence
PQGARGLPGTAGLPGMKGHR

SEQ ID NO: 6324 - protein, 20 aa, Artificial Sequence
  Description of Artificial Sequence: targeting sequence/synthetic sequence
KKLYKTYATKEGIPKSNRSH

SEQ ID NO: 6325 - protein, 20 aa, Artificial Sequence
  Description of Artificial Sequence: targeting sequence/synthetic sequence
RGVRHNSSLLQDQQHSLRQL

SEQ ID NO: 6326 - protein, 20 aa, Artificial Sequence
  Description of Artificial Sequence: targeting sequence/synthetic sequence
NFGAILSSTNVGSNTYGKRN

SEQ ID NO: 6327 - protein, 20 aa, Artificial Sequence
  Description of Artificial Sequence: targeting sequence/synthetic sequence
EKTIKISSSGNRFNQVVVMN

SEQ ID NO: 6328 - protein, 20 aa, Artificial Sequence
  Description of Artificial Sequence: targeting sequence/synthetic sequence
GSDSKAVTGLRTIDGKKYYF

SEQ ID NO: 6329 - protein, 20 aa, Artificial Sequence
  Description of Artificial Sequence: targeting sequence/synthetic sequence
GERGTTLSGGQKQRLAIARA

SEQ ID NO: 6330 - protein, 20 aa, Artificial Sequence
  Description of Artificial Sequence: targeting sequence/synthetic sequence
AKKAGAAKPRKPAGAAKKPK

SEQ ID NO: 6331 - protein, 20 aa, Artificial Sequence
  Description of Artificial Sequence: targeting sequence/synthetic sequence
RDKEVNSQLYSKLTVRGKVQ

SEQ ID NO: 6332 - protein, 20 aa, Artificial Sequence
  Description of Artificial Sequence: targeting sequence/synthetic sequence
KAAKKAKAAKKAKAAKKAKA

SEQ ID NO: 6333 - protein, 20 aa, Artificial Sequence
  Description of Artificial Sequence: targeting sequence/synthetic sequence
HLQLAIRNDEELNKLLGRVT

SEQ ID NO: 6334 - protein, 20 aa, Artificial Sequence
  Description of Artificial Sequence: targeting sequence/synthetic sequence
TLQRVAGISRTGMQINRHSL

SEQ ID NO: 6335 - protein, 20 aa, Artificial Sequence
  Description of Artificial Sequence: targeting sequence/synthetic sequence
RQRHRDCDKPPDKGNCGPVR

SEQ ID NO: 6336 - protein, 20 aa, Artificial Sequence
  Description of Artificial Sequence: targeting sequence/synthetic sequence
QGITKPAIRRLARRGGVKRI

SEQ ID NO: 6337 - protein, 20 aa, Artificial Sequence
  Description of Artificial Sequence: targeting sequence/synthetic sequence
KIHLQTTDYGNFLANHTNPL

SEQ ID NO: 6338 - protein, 20 aa, Artificial Sequence
  Description of Artificial Sequence: targeting sequence/synthetic sequence
RNPRGSSSRQSSSSAMSSSS

SEQ ID NO: 6339 - protein, 20 aa, Artificial Sequence
  Description of Artificial Sequence: targeting sequence/synthetic sequence
TKPAIRRLARRGGVKRISGL

SEQ ID NO: 6340 - protein, 20 aa, Artificial Sequence
  Description of Artificial Sequence: targeting sequence/synthetic sequence
WVALAAVDSAVYGVQRGAKK

SEQ ID NO: 6341 - protein, 20 aa, Artificial Sequence
  Description of Artificial Sequence: targeting sequence/synthetic sequence
LKENGGARLAEYHAKATEHL

SEQ ID NO: 6342 - protein, 20 aa, Artificial Sequence
  Description of Artificial Sequence: targeting sequence/synthetic sequence
STYMAASGLNASTYDQVGRS

SEQ ID NO: 6343 - protein, 20 aa, Artificial Sequence
  Description of Artificial Sequence: targeting sequence/synthetic sequence
DSVLTALQDSSKRKQLVSDG

SEQ ID NO: 6344 - protein, 20 aa, Artificial Sequence
  Description of Artificial Sequence: targeting sequence/synthetic sequence
LESRSINEKDYHSRRYIDEY

SEQ ID NO: 6345 - protein, 20 aa, Artificial Sequence
  Description of Artificial Sequence: targeting sequence/synthetic sequence
KHSVDSVLTALQDSSKRKQL

SEQ ID NO: 6346 - protein, 20 aa, Artificial Sequence
  Description of Artificial Sequence: targeting sequence/synthetic sequence
YLESRSINEKDYHSRRYIDE

SEQ ID NO: 6347 - protein, 20 aa, Artificial Sequence
  Description of Artificial Sequence: targeting sequence/synthetic sequence
AGVAGRITGSMSLASGKSLL

SEQ ID NO: 6348 - protein, 20 aa, Artificial Sequence
  Description of Artificial Sequence: targeting sequence/synthetic sequence
AGMAGGITGSMSLASGRSLL

SEQ ID NO: 6349 - protein, 20 aa, Artificial Sequence
  Description of Artificial Sequence: targeting sequence/synthetic sequence
HAKSSDWGLQAGYIPVNPNL

SEQ ID NO: 6350 - protein, 20 aa, Artificial Sequence
  Description of Artificial Sequence: targeting sequence/synthetic sequence
VHAKSSDWGLQAGYIPVNPN

SEQ ID NO: 6351 - protein, 20 aa, Artificial Sequence
  Description of Artificial Sequence: targeting sequence/synthetic sequence
SATYDDEHHSTLVSTRHYRA

SEQ ID NO: 6352 - protein, 20 aa, Artificial Sequence
  Description of Artificial Sequence: targeting sequence/synthetic sequence
KGLGVHAKSSDWGLQAGYIP

SEQ ID NO: 6353 - protein, 20 aa, Artificial Sequence
  Description of Artificial Sequence: targeting sequence/synthetic sequence
HYLESRSINEKDYHSRRYID

SEQ ID NO: 6354 - protein, 20 aa, Artificial Sequence
  Description of Artificial Sequence: targeting sequence/synthetic sequence
TYDDEHHSTLVSTRHYRAPE

SEQ ID NO: 6355 - protein, 20 aa, Artificial Sequence
  Description of Artificial Sequence: targeting sequence/synthetic sequence
LGVHAKSSDWGLQAGYIPVN

SEQ ID NO: 6356 - protein, 20 aa, Artificial Sequence
  Description of Artificial Sequence: targeting sequence/synthetic sequence
YKVLKQVHPDTGISSKAMGI

SEQ ID NO: 6357 - protein, 20 aa, Artificial Sequence
  Description of Artificial Sequence: targeting sequence/synthetic sequence
VYKVLKQVHPDTGISSKAMG

SEQ ID NO: 6358 - protein, 20 aa, Artificial Sequence
  Description of Artificial Sequence: targeting sequence/synthetic sequence
YLTAEILELAGNAARDNKKT

SEQ ID NO: 6359 - protein, 20 aa, Artificial Sequence
  Description of Artificial Sequence: targeting sequence/synthetic sequence
KVLKQVHPDTGISSKAMGIM

SEQ ID NO: 6360 - protein, 20 aa, Artificial Sequence
  Description of Artificial Sequence: targeting sequence/synthetic sequence
RLLLPGELAKHAVSEGTKAV

SEQ ID NO: 6361 - protein, 20 aa, Artificial Sequence
  Description of Artificial Sequence: targeting sequence/synthetic sequence
TAVRLLLPGELAKHAVSEGT

SEQ ID NO: 6362 - protein, 20 aa, Artificial Sequence
  Description of Artificial Sequence: targeting sequence/synthetic sequence
VRLLLPGELAKHAVSEGTKA

SEQ ID NO: 6363 - protein, 20 aa, Artificial Sequence
  Description of Artificial Sequence: targeting sequence/synthetic sequence
AVRLLLPGELAKHAVSEGTK

SEQ ID NO: 6364 - protein, 20 aa, Artificial Sequence
  Description of Artificial Sequence: targeting sequence/synthetic sequence
AIAAGATARATTASRLPSSA

SEQ ID NO: 6365 - protein, 20 aa, Artificial Sequence
  Description of Artificial Sequence: targeting sequence/synthetic sequence
SKSLVLGQKLSLTQSDISHI

SEQ ID NO: 6366 - protein, 20 aa, Artificial Sequence
  Description of Artificial Sequence: targeting sequence/synthetic sequence
LGQKLSLTQSDISHIGSMRV

SEQ ID NO: 6367 - protein, 20 aa, Artificial Sequence
  Description of Artificial Sequence: targeting sequence/synthetic sequence
KQTLASVSSGPKHTQSVPAL

SEQ ID NO: 6368 - protein, 20 aa, Artificial Sequence
  Description of Artificial Sequence: targeting sequence/synthetic sequence
LLGIEQGVGVPGGSPGSRHR

SEQ ID NO: 6369 - protein, 20 aa, Artificial Sequence
  Description of Artificial Sequence: targeting sequence/synthetic sequence
ALAGQRQGTQAESNLSSKFQ

SEQ ID NO: 6370 - protein, 20 aa, Artificial Sequence
  Description of Artificial Sequence: targeting sequence/synthetic sequence
TSGAIAAGATARATTASRLP

SEQ ID NO: 6371 - protein, 20 aa, Artificial Sequence
  Description of Artificial Sequence: targeting sequence/synthetic sequence
GQGGLAYPGVRTHGTLESVN

SEQ ID NO: 6372 - protein, 20 aa, Artificial Sequence
  Description of Artificial Sequence: targeting sequence/synthetic sequence
PKGYGYGQGAGTLSTDKGES

SEQ ID NO: 6373 - protein, 20 aa, Artificial Sequence
  Description of Artificial Sequence: targeting sequence/synthetic sequence
GAAMGAASLTLSAQSRTSLA

SEQ ID NO: 6374 - protein, 20 aa, Artificial Sequence
  Description of Artificial Sequence: targeting sequence/synthetic sequence
LTTAGAAMGAASLTLSAQSR

SEQ ID NO: 6375 - protein, 20 aa, Artificial Sequence
  Description of Artificial Sequence: targeting sequence/synthetic sequence
GKDLLAGGVAAAVSKTAVAP

SEQ ID NO: 6376 - protein, 20 aa, Artificial Sequence
  Description of Artificial Sequence: targeting sequence/synthetic sequence
REMSGSPASGIPVKVSATVS

SEQ ID NO: 6377 - protein, 20 aa, Artificial Sequence
  Description of Artificial Sequence: targeting sequence/synthetic sequence
TAGAAMGAASLTLSAQSRTL

SEQ ID NO: 6378 - protein, 20 aa, Artificial Sequence
  Description of Artificial Sequence: targeting sequence/synthetic sequence
QVHPDTGISSKAMSIMNSFV

SEQ ID NO: 6379 - protein, 20 aa, Artificial Sequence
  Description of Artificial Sequence: targeting sequence/synthetic sequence
LGAAGSTMGAVSVALTGQAR

SEQ ID NO: 6380 - protein, 20 aa, Artificial Sequence
  Description of Artificial Sequence: targeting sequence/synthetic sequence
FGKDLLAGGVAAAVSKTAVA

SEQ ID NO: 6381 - protein, 20 aa, Artificial Sequence
  Description of Artificial Sequence: targeting sequence/synthetic sequence
SGAIAAGATARATTASRLPS

SEQ ID NO: 6382 - protein, 20 aa, Artificial Sequence
  Description of Artificial Sequence: targeting sequence/synthetic sequence
GSAMGAASLTVSAQSRTLLA

SEQ ID NO: 6383 - protein, 20 aa, Artificial Sequence
  Description of Artificial Sequence: targeting sequence/synthetic sequence
GVEVHNAKTKPREEQFNSTF

SEQ ID NO: 6384 - protein, 20 aa, Artificial Sequence
  Description of Artificial Sequence: targeting sequence/synthetic sequence
KLSLTQSDISHIGSMRVEGI

SEQ ID NO: 6385 - protein, 20 aa, Artificial Sequence
  Description of Artificial Sequence: targeting sequence/synthetic sequence
DALQRGKGLSHGVPEHPALP

SEQ ID NO: 6386 - protein, 20 aa, Artificial Sequence
  Description of Artificial Sequence: targeting sequence/synthetic sequence
LKQVHPDTGISSKAMSIMNS

SEQ ID NO: 6387 - protein, 20 aa, Artificial Sequence
  Description of Artificial Sequence: targeting sequence/synthetic sequence
GGATNANARAKGGTGQTGGL

SEQ ID NO: 6388 - protein, 20 aa, Artificial Sequence
  Description of Artificial Sequence: targeting sequence/synthetic sequence
AAGSTMGAASMTLTVQARQL

SEQ ID NO: 6389 - protein, 20 aa, Artificial Sequence
  Description of Artificial Sequence: targeting sequence/synthetic sequence
YSPNYNPQSRSVPPSASHVA

SEQ ID NO: 6390 - protein, 20 aa, Artificial Sequence
  Description of Artificial Sequence: targeting sequence/synthetic sequence
GPPVSELITKAVAASKERSG

SEQ ID NO: 6391 - protein, 20 aa, Artificial Sequence
  Description of Artificial Sequence: targeting sequence/synthetic sequence
EILELAGNAARDNKKTRIIP

SEQ ID NO: 6392 - protein, 20 aa, Artificial Sequence
  Description of Artificial Sequence: targeting sequence/synthetic sequence
SELIVQAASSSKERGGVSLA

SEQ ID NO: 6393 - protein, 20 aa, Artificial Sequence
  Description of Artificial Sequence: targeting sequence/synthetic sequence
GSTYMAASGLNASTYDQVGR

SEQ ID NO: 6394 - protein, 20 aa, Artificial Sequence
  Description of Artificial Sequence: targeting sequence/synthetic sequence
GAIAAGATARATTASRLPSS

SEQ ID NO: 6395 - protein, 20 aa, Artificial Sequence
  Description of Artificial Sequence: targeting sequence/synthetic sequence
AAMGAASLTLSAQSRTLLAG

SEQ ID NO: 6396 - protein, 20 aa, Artificial Sequence
  Description of Artificial Sequence: targeting sequence/synthetic sequence
SQVILGAHSITREEPTKQIM

SEQ ID NO: 6397 - protein, 20 aa, Artificial Sequence
  Description of Artificial Sequence: targeting sequence/synthetic sequence
IAPVVSSRVSPGTRPTAMGS

SEQ ID NO: 6398 - protein, 20 aa, Artificial Sequence
  Description of Artificial Sequence: targeting sequence/synthetic sequence
LSLTQSDISHIGSMRVEGIV

SEQ ID NO: 6399 - protein, 20 aa, Artificial Sequence
  Description of Artificial Sequence: targeting sequence/synthetic sequence
EILELAGNASRDNKKTRIIP

SEQ ID NO: 6400 - protein, 20 aa, Artificial Sequence
  Description of Artificial Sequence: targeting sequence/synthetic sequence
AIGAGVAGGITGSMSLASGK

SEQ ID NO: 6401 - protein, 20 aa, Artificial Sequence
  Description of Artificial Sequence: targeting sequence/synthetic sequence
QLQPALQTGSEELKSLYNAV

SEQ ID NO: 6402 - protein, 20 aa, Artificial Sequence
  Description of Artificial Sequence: targeting sequence/synthetic sequence
TIVKAGPEYGQGMNPISRLA

SEQ ID NO: 6403 - protein, 20 aa, Artificial Sequence
  Description of Artificial Sequence: targeting sequence/synthetic sequence
GQKLSLTQSDISHIGSMRVE

SEQ ID NO: 6404 - protein, 20 aa, Artificial Sequence
  Description of Artificial Sequence: targeting sequence/synthetic sequence
QLKSVGLNLEGNGVATDVPT

SEQ ID NO: 6405 - protein, 20 aa, Artificial Sequence
  Description of Artificial Sequence: targeting sequence/synthetic sequence
SSNSDSTQSQKSGRNSNPRQ

SEQ ID NO: 6406 - protein, 20 aa, Artificial Sequence
  Description of Artificial Sequence: targeting sequence/synthetic sequence
PKTIVKAGPEYGQGMNPISR

SEQ ID NO: 6407 - protein, 20 aa, Artificial Sequence
  Description of Artificial Sequence: targeting sequence/synthetic sequence
TAGSAMGAASLTLSAQSRTL

SEQ ID NO: 6408 - protein, 20 aa, Artificial Sequence
  Description of Artificial Sequence: targeting sequence/synthetic sequence
PNYNPQSRSVPPSASHVAPT

SEQ ID NO: 6409 - protein, 20 aa, Artificial Sequence
  Description of Artificial Sequence: targeting sequence/synthetic sequence
TKQTLASVSSGPKHTQSVPA

SEQ ID NO: 6410 - protein, 20 aa, Artificial Sequence
  Description of Artificial Sequence: targeting sequence/synthetic sequence
KVLKQVHPDTGISSKAMSIM

SEQ ID NO: 6411 - protein, 20 aa, Artificial Sequence
  Description of Artificial Sequence: targeting sequence/synthetic sequence
VREMSGSPASGIPVKVSATV

SEQ ID NO: 6412 - protein, 20 aa, Artificial Sequence
  Description of Artificial Sequence: targeting sequence/synthetic sequence
QTLASVSSGPKHTQSVPALT

SEQ ID NO: 6413 - protein, 20 aa, Artificial Sequence
  Description of Artificial Sequence: targeting sequence/synthetic sequence
IVQAASSSKERGGVSLAALK

SEQ ID NO: 6414 - protein, 20 aa, Artificial Sequence
  Description of Artificial Sequence: targeting sequence/synthetic sequence
GAAGSTMGARSMTLTVQARQ

SEQ ID NO: 6415 - protein, 20 aa, Artificial Sequence
  Description of Artificial Sequence: targeting sequence/synthetic sequence
QQLEPALKTGSEDLKSLWNA

SEQ ID NO: 6416 - protein, 20 aa, Artificial Sequence
  Description of Artificial Sequence: targeting sequence/synthetic sequence
EALSAGPGTSGSHLDRSTVS

SEQ ID NO: 6417 - protein, 20 aa, Artificial Sequence
  Description of Artificial Sequence: targeting sequence/synthetic sequence
LGAAGSTMGARSVTLTVQAR

SEQ ID NO: 6418 - protein, 20 aa, Artificial Sequence
  Description of Artificial Sequence: targeting sequence/synthetic sequence
MAASGLNASTYDQVGRSHIT

SEQ ID NO: 6419 - protein, 20 aa, Artificial Sequence
  Description of Artificial Sequence: targeting sequence/synthetic sequence
GQLQPSLKTGSEEIRSLYNT

SEQ ID NO: 6420 - protein, 20 aa, Artificial Sequence
  Description of Artificial Sequence: targeting sequence/synthetic sequence
TTAGAAMGAASLTLSAQSRT

SEQ ID NO: 6421 - protein, 20 aa, Artificial Sequence
  Description of Artificial Sequence: targeting sequence/synthetic sequence
PPYGGHQPGLYPQQPNYKRH

SEQ ID NO: 6422 - protein, 20 aa, Artificial Sequence
  Description of Artificial Sequence: targeting sequence/synthetic sequence
AGAAMGAASLTLSAQSRTLL

SEQ ID NO: 6423 - protein, 20 aa, Artificial Sequence
  Description of Artificial Sequence: targeting sequence/synthetic sequence
GGIAAGVGTGTTALVATKQF

SEQ ID NO: 6424 - protein, 20 aa, Artificial Sequence
  Description of Artificial Sequence: targeting sequence/synthetic sequence
EELNKLLGKVTIAQGGVLPN

SEQ ID NO: 6425 - protein, 20 aa, Artificial Sequence
  Description of Artificial Sequence: targeting sequence/synthetic sequence
LGTGTGGSGGFHLAQQASAS

SEQ ID NO: 6426 - protein, 20 aa, Artificial Sequence
  Description of Artificial Sequence: targeting sequence/synthetic sequence
RKGNYAERIGAGAPVYLAAV

SEQ ID NO: 6427 - protein, 20 aa, Artificial Sequence
  Description of Artificial Sequence: targeting sequence/synthetic sequence
TGGSGGFHLAQQASASGSVS

SEQ ID NO: 6428 - protein, 20 aa, Artificial Sequence
  Description of Artificial Sequence: targeting sequence/synthetic sequence
IVKAGPEYGQGMNPISRLAQ

SEQ ID NO: 6429 - protein, 20 aa, Artificial Sequence
  Description of Artificial Sequence: targeting sequence/synthetic sequence
DGLLIPTSGTDTTVTKPKSR

SEQ ID NO: 6430 - protein, 20 aa, Artificial Sequence
  Description of Artificial Sequence: targeting sequence/synthetic sequence
GIAAGVGTGTTALVATKQFE

SEQ ID NO: 6431 - protein, 20 aa, Artificial Sequence
  Description of Artificial Sequence: targeting sequence/synthetic sequence
RQHLEALSAGPGTSGSHLDR

SEQ ID NO: 6432 - protein, 20 aa, Artificial Sequence
  Description of Artificial Sequence: targeting sequence/synthetic sequence
EIYHSGSTNYNPSLKSRVTI

SEQ ID NO: 6433 - protein, 20 aa, Artificial Sequence
  Description of Artificial Sequence: targeting sequence/synthetic sequence
GAAGSTMGAASMTLTVQARQ

SEQ ID NO: 6434 - protein, 20 aa, Artificial Sequence
  Description of Artificial Sequence: targeting sequence/synthetic sequence
AFPSIGSGRNGFPKQTAAQL

SEQ ID NO: 6435 - protein, 20 aa, Artificial Sequence
  Description of Artificial Sequence: targeting sequence/synthetic sequence
GAASLTLSAQSRTSLAGIVQ

SEQ ID NO: 6436 - protein, 20 aa, Artificial Sequence
  Description of Artificial Sequence: targeting sequence/synthetic sequence
QIADSQHRSHRQMATTTNPL

SEQ ID NO: 6437 - protein, 20 aa, Artificial Sequence
  Description of Artificial Sequence: targeting sequence/synthetic sequence
GGSGGFHLAQQASASGSVSI

SEQ ID NO: 6438 - protein, 20 aa, Artificial Sequence
  Description of Artificial Sequence: targeting sequence/synthetic sequence
YGGGATNANARAKGGTGQTG

SEQ ID NO: 6439 - protein, 20 aa, Artificial Sequence
  Description of Artificial Sequence: targeting sequence/synthetic sequence
VHPDTGISSKAMGIMNSFVN

SEQ ID NO: 6440 - protein, 20 aa, Artificial Sequence
  Description of Artificial Sequence: targeting sequence/synthetic sequence
SELITKAVAASKERSGVSLA

SEQ ID NO: 6441 - protein, 20 aa, Artificial Sequence
  Description of Artificial Sequence: targeting sequence/synthetic sequence
ELNKLLGKVTIAQGGVLPNI

SEQ ID NO: 6442 - protein, 20 aa, Artificial Sequence
  Description of Artificial Sequence: targeting sequence/synthetic sequence
QVHPDTGISSKAMGIMNSFV

SEQ ID NO: 6443 - protein, 20 aa, Artificial Sequence
  Description of Artificial Sequence: targeting sequence/synthetic sequence
GIEQGVGVPGGSPGSRHRQK

SEQ ID NO: 6444 - protein, 20 aa, Artificial Sequence
  Description of Artificial Sequence: targeting sequence/synthetic sequence
QRGKGLSHGVPEHPALPTAS

SEQ ID NO: 6445 - protein, 20 aa, Artificial Sequence
  Description of Artificial Sequence: targeting sequence/synthetic sequence
HPDTGISSKAMGIMNSFVND

SEQ ID NO: 6446 - protein, 20 aa, Artificial Sequence
  Description of Artificial Sequence: targeting sequence/synthetic sequence
LGAAGSTMGAAAITLTAQAR

SEQ ID NO: 6447 - protein, 20 aa, Artificial Sequence
  Description of Artificial Sequence: targeting sequence/synthetic sequence
NQLLKGVTIASGGVLPNIHP

SEQ ID NO: 6448 - protein, 20 aa, Artificial Sequence
  Description of Artificial Sequence: targeting sequence/synthetic sequence
KSVGLNLEGSGVSTDIPSAT

SEQ ID NO: 6449 - protein, 20 aa, Artificial Sequence
  Description of Artificial Sequence: targeting sequence/synthetic sequence
SSKSLVLGQKLSLTQSDISH

SEQ ID NO: 6450 - protein, 20 aa, Artificial Sequence
  Description of Artificial Sequence: targeting sequence/synthetic sequence
AMGAGMAGGITGSMSLASGR

SEQ ID NO: 6451 - protein, 20 aa, Artificial Sequence
  Description of Artificial Sequence: targeting sequence/synthetic sequence
GAAGSTMGAGSLTLTVQARQ

SEQ ID NO: 6452 - protein, 20 aa, Artificial Sequence
  Description of Artificial Sequence: targeting sequence/synthetic sequence
KQVHPDTGISSKAMSIMNSF

SEQ ID NO: 6453 - protein, 20 aa, Artificial Sequence
  Description of Artificial Sequence: targeting sequence/synthetic sequence
AGVAGGITGSMSLASGKSLL

SEQ ID NO: 6454 - protein, 20 aa, Artificial Sequence
  Description of Artificial Sequence: targeting sequence/synthetic sequence
IADSQHRSHRQMATATNPLI

SEQ ID NO: 6455 - protein, 20 aa, Artificial Sequence
  Description of Artificial Sequence: targeting sequence/synthetic sequence
ILGAHSITREEPTKQIMLVK

SEQ ID NO: 6456 - protein, 20 aa, Artificial Sequence
  Description of Artificial Sequence: targeting sequence/synthetic sequence
NKLLGRVTIAQGGVLPNIQA

SEQ ID NO: 6457 - protein, 20 aa, Artificial Sequence
  Description of Artificial Sequence: targeting sequence/synthetic sequence
VSELITKAVAASKERSGVSL

SEQ ID NO: 6458 - protein, 20 aa, Artificial Sequence
  Description of Artificial Sequence: targeting sequence/synthetic sequence
LAVHVPEGQTIKGRVGTVGY

SEQ ID NO: 6459 - protein, 20 aa, Artificial Sequence
  Description of Artificial Sequence: targeting sequence/synthetic sequence
SAMGAASLTLSAQSRTLLAG

SEQ ID NO: 6460 - protein, 20 aa, Artificial Sequence
  Description of Artificial Sequence: targeting sequence/synthetic sequence
FPSIGSGRNGFPKQTAAQLI

SEQ ID NO: 6461 - protein, 20 aa, Artificial Sequence
  Description of Artificial Sequence: targeting sequence/synthetic sequence
SVSSRSYSPERSKSYSFHQS

SEQ ID NO: 6462 - protein, 20 aa, Artificial Sequence
  Description of Artificial Sequence: targeting sequence/synthetic sequence
IIGQLQPSLQTGSEELKSLY

SEQ ID NO: 6463 - protein, 20 aa, Artificial Sequence
  Description of Artificial Sequence: targeting sequence/synthetic sequence
LISPKRTKPPLPSVRKLVED

SEQ ID NO: 6464 - protein, 20 aa, Artificial Sequence
  Description of Artificial Sequence: targeting sequence/synthetic sequence
GIAGGVTGSLSLASSKSLLL

SEQ ID NO: 6465 - protein, 20 aa, Artificial Sequence
  Description of Artificial Sequence: targeting sequence/synthetic sequence
KTIVKAGPEYGQGMNPISRL

SEQ ID NO: 6466 - protein, 20 aa, Artificial Sequence
  Description of Artificial Sequence: targeting sequence/synthetic sequence
KLLGKVTIAQGGVLPNIQAV

SEQ ID NO: 6467 - protein, 20 aa, Artificial Sequence
  Description of Artificial Sequence: targeting sequence/synthetic sequence
TSRMSTSQIPGRVASSGLQS

SEQ ID NO: 6468 - protein, 20 aa, Artificial Sequence
  Description of Artificial Sequence: targeting sequence/synthetic sequence
QIMKQLQPALTGTEELRSLF

SEQ ID NO: 6469 - protein, 20 aa, Artificial Sequence
  Description of Artificial Sequence: targeting sequence/synthetic sequence
KALKLMGSNEGEFKAEGNSK

SEQ ID NO: 6470 - protein, 20 aa, Artificial Sequence
  Description of Artificial Sequence: targeting sequence/synthetic sequence
SDSSNSDSTQSQKSGRNSNP

SEQ ID NO: 6471 - protein, 20 aa, Artificial Sequence
  Description of Artificial Sequence: targeting sequence/synthetic sequence
QTAVRLLLPGELAKHAVSEG

SEQ ID NO: 6472 - protein, 20 aa, Artificial Sequence
  Description of Artificial Sequence: targeting sequence/synthetic sequence
SWGRGSAGGNAHSPLGVPGG

SEQ ID NO: 6473 - protein, 20 aa, Artificial Sequence
  Description of Artificial Sequence: targeting sequence/synthetic sequence
LRKGNYAERVGAGAPVYMAA

SEQ ID NO: 6474 - protein, 20 aa, Artificial Sequence
  Description of Artificial Sequence: targeting sequence/synthetic sequence
KASGPPVSELITKAVAASKE

SEQ ID NO: 6475 - protein, 20 aa, Artificial Sequence
  Description of Artificial Sequence: targeting sequence/synthetic sequence
SRMSTSQIPGRVASSGLQSV

SEQ ID NO: 6476 - protein, 20 aa, Artificial Sequence
  Description of Artificial Sequence: targeting sequence/synthetic sequence
VHVPEGQTIKGRVGTVGYMA

SEQ ID NO: 6477 - protein, 20 aa, Artificial Sequence
  Description of Artificial Sequence: targeting sequence/synthetic sequence
RSGSSVSSRSYSPERSKSYS

SEQ ID NO: 6478 - protein, 20 aa, Artificial Sequence
  Description of Artificial Sequence: targeting sequence/synthetic sequence
GIAGQRGVVGLPGQRGERGF

SEQ ID NO: 6479 - protein, 20 aa, Artificial Sequence
  Description of Artificial Sequence: targeting sequence/synthetic sequence
FAIGIVGDAGVRGTAQQPRL

SEQ ID NO: 6480 - protein, 20 aa, Artificial Sequence
  Description of Artificial Sequence: targeting sequence/synthetic sequence
GLNTADTARLNANIRYVNTG

SEQ ID NO: 6481 - protein, 20 aa, Artificial Sequence
  Description of Artificial Sequence: targeting sequence/synthetic sequence
SGSSVSSRSYSPERSKSYSF

SEQ ID NO: 6482 - protein, 20 aa, Artificial Sequence
  Description of Artificial Sequence: targeting sequence/synthetic sequence
LTMGGIAAGVGTGTTALVAT

SEQ ID NO: 6483 - protein, 20 aa, Artificial Sequence
  Description of Artificial Sequence: targeting sequence/synthetic sequence
ILGQLQPSLKTGSEEIRSLY

SEQ ID NO: 6484 - protein, 20 aa, Artificial Sequence
  Description of Artificial Sequence: targeting sequence/synthetic sequence
RKGNYAERVGAGAPVYLAAV

SEQ ID NO: 6485 - protein, 20 aa, Artificial Sequence
  Description of Artificial Sequence: targeting sequence/synthetic sequence
QGGVLPNIQAVLLPKKTESH

SEQ ID NO: 6486 - protein, 20 aa, Artificial Sequence
  Description of Artificial Sequence: targeting sequence/synthetic sequence
LNTADTARLNANIRYVNTGT

SEQ ID NO: 6487 - protein, 20 aa, Artificial Sequence
  Description of Artificial Sequence: targeting sequence/synthetic sequence
GVSQDHMRAHYQTGSNHMML

SEQ ID NO: 6488 - protein, 20 aa, Artificial Sequence
  Description of Artificial Sequence: targeting sequence/synthetic sequence
GATARATTASRLPSSAVTPR

SEQ ID NO: 6489 - protein, 20 aa, Artificial Sequence
  Description of Artificial Sequence: targeting sequence/synthetic sequence
ARATTASRLPSSAVTPRAPH

SEQ ID NO: 6490 - protein, 20 aa, Artificial Sequence
  Description of Artificial Sequence: targeting sequence/synthetic sequence
GFAIGIVGDAGVRGTAQQPR

SEQ ID NO: 6491 - protein, 20 aa, Artificial Sequence
  Description of Artificial Sequence: targeting sequence/synthetic sequence
FLGAAGSTMGARSMTLTVQA

SEQ ID NO: 6492 - protein, 20 aa, Artificial Sequence
  Description of Artificial Sequence: targeting sequence/synthetic sequence
IIGQLQSSLQTGSEELKSLY

SEQ ID NO: 6493 - protein, 20 aa, Artificial Sequence
  Description of Artificial Sequence: targeting sequence/synthetic sequence
VKKALKLMGSNEGEFKAEGN

SEQ ID NO: 6494 - protein, 20 aa, Artificial Sequence
  Description of Artificial Sequence: targeting sequence/synthetic sequence
SVYVYKVLKQVHPDTGISSK

SEQ ID NO: 6495 - protein, 20 aa, Artificial Sequence
  Description of Artificial Sequence: targeting sequence/synthetic sequence
KYGPKGYGYGQGAGTLSTDK

SEQ ID NO: 6496 - protein, 20 aa, Artificial Sequence
  Description of Artificial Sequence: targeting sequence/synthetic sequence
FLATAGSAMGAASLTLSAHP

SEQ ID NO: 6497 - protein, 20 aa, Artificial Sequence
  Description of Artificial Sequence: targeting sequence/synthetic sequence
STMGAASITLTVQARQLLSG

SEQ ID NO: 6498 - protein, 20 aa, Artificial Sequence
  Description of Artificial Sequence: targeting sequence/synthetic sequence
IGEIYHSGSTNYNPSLKSRV

SEQ ID NO: 6499 - protein, 20 aa, Artificial Sequence
  Description of Artificial Sequence: targeting sequence/synthetic sequence
AGSTMGAAAVTLTVQARQLL

SEQ ID NO: 6500 - protein, 20 aa, Artificial Sequence
  Description of Artificial Sequence: targeting sequence/synthetic sequence
IAQGGVLPNIQAVLLPKKTE

SEQ ID NO: 6501 - protein, 20 aa, Artificial Sequence
  Description of Artificial Sequence: targeting sequence/synthetic sequence
STMGAASLTLTVQARQLLSG

SEQ ID NO: 6502 - protein, 20 aa, Artificial Sequence
  Description of Artificial Sequence: targeting sequence/synthetic sequence
FYPLEGGRVLLDGKPISAYD

SEQ ID NO: 6503 - protein, 20 aa, Artificial Sequence
  Description of Artificial Sequence: targeting sequence/synthetic sequence
LLRKGNYAERVGAGAPVYMA

SEQ ID NO: 6504 - protein, 20 aa, Artificial Sequence
  Description of Artificial Sequence: targeting sequence/synthetic sequence
YNTTYLNVQRENGTISRYVG

SEQ ID NO: 6505 - protein, 20 aa, Artificial Sequence
  Description of Artificial Sequence: targeting sequence/synthetic sequence
LLRKGNYAERVGAGAPVYLA

SEQ ID NO: 6506 - protein, 20 aa, Artificial Sequence
  Description of Artificial Sequence: targeting sequence/synthetic sequence
LRKGNYAERIGAGAPVYLAA

SEQ ID NO: 6507 - protein, 20 aa, Artificial Sequence
  Description of Artificial Sequence: targeting sequence/synthetic sequence
GKVTIAQGGVLPNIQAVLLP

SEQ ID NO: 6508 - protein, 20 aa, Artificial Sequence
  Description of Artificial Sequence: targeting sequence/synthetic sequence
AGAAMGAASLTLSAQSRTLF

SEQ ID NO: 6509 - protein, 20 aa, Artificial Sequence
  Description of Artificial Sequence: targeting sequence/synthetic sequence
GARASVLTGGKLDAWEKIRL

SEQ ID NO: 6510 - protein, 20 aa, Artificial Sequence
  Description of Artificial Sequence: targeting sequence/synthetic sequence
SQDHMRAHYQTGSNHMMLNI

SEQ ID NO: 6511 - protein, 20 aa, Artificial Sequence
  Description of Artificial Sequence: targeting sequence/synthetic sequence
SRVMGTNDGKALLPAVRTLK

SEQ ID NO: 6512 - protein, 20 aa, Artificial Sequence
  Description of Artificial Sequence: targeting sequence/synthetic sequence
LLRKGNYAERIGAGAPVYLA

SEQ ID NO: 6513 - protein, 20 aa, Artificial Sequence
  Description of Artificial Sequence: targeting sequence/synthetic sequence
ANLELINTWVAKNTNNKISR

SEQ ID NO: 6514 - protein, 20 aa, Artificial Sequence
  Description of Artificial Sequence: targeting sequence/synthetic sequence
RAYGPYTPQPQPKDMVKPPY

SEQ ID NO: 6515 - protein, 20 aa, Artificial Sequence
  Description of Artificial Sequence: targeting sequence/synthetic sequence
RVTIAQGGVLPNIQAVLLPK

SEQ ID NO: 6516 - protein, 20 aa, Artificial Sequence
  Description of Artificial Sequence: targeting sequence/synthetic sequence
TTYLNVQRENGTISRYVGGQ

SEQ ID NO: 6517 - protein, 20 aa, Artificial Sequence
  Description of Artificial Sequence: targeting sequence/synthetic sequence
FSRDFLDSREAPRDIQARMR

SEQ ID NO: 6518 - protein, 20 aa, Artificial Sequence
  Description of Artificial Sequence: targeting sequence/synthetic sequence
NLELINTWVAKNTNNKISRL

SEQ ID NO: 6519 - protein, 20 aa, Artificial Sequence
  Description of Artificial Sequence: targeting sequence/synthetic sequence
RFSKDFLDSREPHRDIHARM

SEQ ID NO: 6520 - protein, 20 aa, Artificial Sequence
  Description of Artificial Sequence: targeting sequence/synthetic sequence
KYGPKGYGYGQGAGTLNMDR

SEQ ID NO: 6521 - protein, 20 aa, Artificial Sequence
  Description of Artificial Sequence: targeting sequence/synthetic sequence
LRKGNYAERVGAGAPVYLAA

SEQ ID NO: 6522 - protein, 20 aa, Artificial Sequence
  Description of Artificial Sequence: targeting sequence/synthetic sequence
ASRVMGTNDGKALLPAVRTL

SEQ ID NO: 6523 - protein, 20 aa, Artificial Sequence
  Description of Artificial Sequence: targeting sequence/synthetic sequence
QPPYGGHQPGLYPQQPNYKR

SEQ ID NO: 6524 - protein, 20 aa, Artificial Sequence
  Description of Artificial Sequence: targeting sequence/synthetic sequence
GVTIAQGGVLPNIQAVLLPK

SEQ ID NO: 6525 - protein, 20 aa, Artificial Sequence
  Description of Artificial Sequence: targeting sequence/synthetic sequence
ARAYGPYTPQPQPKDMVKPP

SEQ ID NO: 6526 - protein, 20 aa, Artificial Sequence
  Description of Artificial Sequence: targeting sequence/synthetic sequence
GGTATWKPGSSGPGSTGSWN

SEQ ID NO: 6527 - protein, 20 aa, Artificial Sequence
  Description of Artificial Sequence: targeting sequence/synthetic sequence
PGSTGTWNPGSSERGSAGHW

SEQ ID NO: 6528 - protein, 20 aa, Artificial Sequence
  Description of Artificial Sequence: targeting sequence/synthetic sequence
RASVLSGGKLDKWEKIQLRP

SEQ ID NO: 6529 - protein, 20 aa, Artificial Sequence
  Description of Artificial Sequence: targeting sequence/synthetic sequence
IKPKKIKPPLPSVTKLTEDR

SEQ ID NO: 6530 - protein, 20 aa, Artificial Sequence
  Description of Artificial Sequence: targeting sequence/synthetic sequence
SSRSYSPERSKSYSFHQSQH

SEQ ID NO: 6531 - protein, 20 aa, Artificial Sequence
  Description of Artificial Sequence: targeting sequence/synthetic sequence
LENFYPLEGGRVLLDGKPIS

SEQ ID NO: 6532 - protein, 20 aa, Artificial Sequence
  Description of Artificial Sequence: targeting sequence/synthetic sequence
VGPAGSPGSNGAPGQRGEPG

SEQ ID NO: 6533 - protein, 20 aa, Artificial Sequence
  Description of Artificial Sequence: targeting sequence/synthetic sequence
GAASLTLSAQSRTLFRGIVQ

SEQ ID NO: 6534 - protein, 20 aa, Artificial Sequence
  Description of Artificial Sequence: targeting sequence/synthetic sequence
ILENFYPLEGGRVLLDGKPI

SEQ ID NO: 6535 - protein, 20 aa, Artificial Sequence
  Description of Artificial Sequence: targeting sequence/synthetic sequence
TAPLTELLHSRNEGVATYAA

SEQ ID NO: 6536 - protein, 20 aa, Artificial Sequence
  Description of Artificial Sequence: targeting sequence/synthetic sequence
LRDTTHISQEVMPQGLGDLI

SEQ ID NO: 6537 - protein, 20 aa, Artificial Sequence
  Description of Artificial Sequence: targeting sequence/synthetic sequence
GATAPLTELLHSRNEGVATY

SEQ ID NO: 6538 - protein, 20 aa, Artificial Sequence
  Description of Artificial Sequence: targeting sequence/synthetic sequence
RDTTHIEQKALAQGLGQMLE

SEQ ID NO: 6539 - protein, 20 aa, Artificial Sequence
  Description of Artificial Sequence: targeting sequence/synthetic sequence
TVTTPGLLLSQALPAPPGAL

SEQ ID NO: 6540 - protein, 20 aa, Artificial Sequence
  Description of Artificial Sequence: targeting sequence/synthetic sequence
SVTVTTPGLLLSQALPAPPG

SEQ ID NO: 6541 - protein, 20 aa, Artificial Sequence
  Description of Artificial Sequence: targeting sequence/synthetic sequence
MGQDPFFLSKPSSFPKAMET

SEQ ID NO: 6542 - protein, 20 aa, Artificial Sequence
  Description of Artificial Sequence: targeting sequence/synthetic sequence
FHSGGYGQDALGMDPMMEHE

SEQ ID NO: 6543 - protein, 20 aa, Artificial Sequence
  Description of Artificial Sequence: targeting sequence/synthetic sequence
QDPFFLSKPSSFPKAMETTT

SEQ ID NO: 6544 - protein, 20 aa, Artificial Sequence
  Description of Artificial Sequence: targeting sequence/synthetic sequence
QILGQLQPSLQTGSEELKSL

SEQ ID NO: 6545 - protein, 20 aa, Artificial Sequence
  Description of Artificial Sequence: targeting sequence/synthetic sequence
IMEQLQSTLKTGSEEIKSLY

SEQ ID NO: 6546 - protein, 20 aa, Artificial Sequence
  Description of Artificial Sequence: targeting sequence/synthetic sequence
LVQLQPALQTGTQEIKSLYN

SEQ ID NO: 6547 - protein, 20 aa, Artificial Sequence
  Description of Artificial Sequence: targeting sequence/synthetic sequence
PPLPSVTELAEDRWNKPQKT

SEQ ID NO: 6548 - protein, 20 aa, Artificial Sequence
  Description of Artificial Sequence: targeting sequence/synthetic sequence
LRKGHQLDGTRRGDNDSHQG

SEQ ID NO: 6549 - protein, 20 aa, Artificial Sequence
  Description of Artificial Sequence: targeting sequence/synthetic sequence
KGHQLDGTRRGDNDSHQGDL

SEQ ID NO: 6550 - protein, 20 aa, Artificial Sequence
  Description of Artificial Sequence: targeting sequence/synthetic sequence
AAGSTMGAASITLTVQARTL

SEQ ID NO: 6551 - protein, 20 aa, Artificial Sequence
  Description of Artificial Sequence: targeting sequence/synthetic sequence
AGSTMGARSMTLTVQARQLL

SEQ ID NO: 6552 - protein, 20 aa, Artificial Sequence
  Description of Artificial Sequence: targeting sequence/synthetic sequence
KIKPPLPSVRKLVEDRWNNP

SEQ ID NO: 6553 - protein, 20 aa, Artificial Sequence
  Description of Artificial Sequence: targeting sequence/synthetic sequence
KPPLPSVQRLTEDRWNKPWK

SEQ ID NO: 6554 - protein, 20 aa, Artificial Sequence
  Description of Artificial Sequence: targeting sequence/synthetic sequence
LIRKLPFQRLVREIAQDFKT

SEQ ID NO: 6555 - protein, 20 aa, Artificial Sequence
  Description of Artificial Sequence: targeting sequence/synthetic sequence
FRSLVSQETSFFDENRTGDL

SEQ ID NO: 6556 - protein, 20 aa, Artificial Sequence
  Description of Artificial Sequence: targeting sequence/synthetic sequence
PGPSGPRGQPGVMGFPGPKG

SEQ ID NO: 6557 - protein, 20 aa, Artificial Sequence
  Description of Artificial Sequence: targeting sequence/synthetic sequence
NFSQILPDPLKPTKRSFIED

SEQ ID NO: 6558 - protein, 20 aa, Artificial Sequence
  Description of Artificial Sequence: targeting sequence/synthetic sequence
FSQILPDPLKPTKRSFIEDL

SEQ ID NO: 6559 - protein, 20 aa, Artificial Sequence
  Description of Artificial Sequence: targeting sequence/synthetic sequence
YQEAKSSKIMESFKNMVPQQ

SEQ ID NO: 6560 - protein, 20 aa, Artificial Sequence
  Description of Artificial Sequence: targeting sequence/synthetic sequence
ELKPANLPVTQPFTVGDNKT

SEQ ID NO: 6561 - protein, 20 aa, Artificial Sequence
  Description of Artificial Sequence: targeting sequence/synthetic sequence
PAKEPAKKSRKHAASDVDLE

SEQ ID NO: 6562 - protein, 20 aa, Artificial Sequence
  Description of Artificial Sequence: targeting sequence/synthetic sequence
LKPANLPVTQPFTVGDNKTY

SEQ ID NO: 6563 - protein, 20 aa, Artificial Sequence
  Description of Artificial Sequence: targeting sequence/synthetic sequence
SASEPAKEPAKKSRKHAASD

SEQ ID NO: 6564 - protein, 20 aa, Artificial Sequence
  Description of Artificial Sequence: targeting sequence/synthetic sequence
MLRKIAVAAASKPAVEIKQE

SEQ ID NO: 6565 - protein, 20 aa, Artificial Sequence
  Description of Artificial Sequence: targeting sequence/synthetic sequence
DPRLLKNIEDRHPTAPCIQE

SEQ ID NO: 6566 - protein, 20 aa, Artificial Sequence
  Description of Artificial Sequence: targeting sequence/synthetic sequence
QALPPSQEVNDAIKQMKKHL

SEQ ID NO: 6567 - protein, 20 aa, Artificial Sequence
  Description of Artificial Sequence: targeting sequence/synthetic sequence
FDLSAVEPAERPSRARLELR

SEQ ID NO: 6568 - protein, 20 aa, Artificial Sequence
  Description of Artificial Sequence: targeting sequence/synthetic sequence
RRYQKSTELLIRKLPFQRLV

SEQ ID NO: 6569 - protein, 20 aa, Artificial Sequence
  Description of Artificial Sequence: targeting sequence/synthetic sequence
LQEACEAYLVGLFEDTNLCA

SEQ ID NO: 6570 - protein, 20 aa, Artificial Sequence
  Description of Artificial Sequence: targeting sequence/synthetic sequence
GGSSSNSTREPPASGRVALV

SEQ ID NO: 6571 - protein, 20 aa, Artificial Sequence
  Description of Artificial Sequence: targeting sequence/synthetic sequence
SLVSQETSFFDENRTGDLIS

SEQ ID NO: 6572 - protein, 20 aa, Artificial Sequence
  Description of Artificial Sequence: targeting sequence/synthetic sequence
YNPSLKSRVTISVDTSKKQL

SEQ ID NO: 6573 - protein, 20 aa, Artificial Sequence
  Description of Artificial Sequence: targeting sequence/synthetic sequence
LCEDPLPPIPKDSSRPKASS

SEQ ID NO: 6574 - protein, 20 aa, Artificial Sequence
  Description of Artificial Sequence: targeting sequence/synthetic sequence
TNYNPSLKSRVTISVDTSKK

SEQ ID NO: 6575 - protein, 20 aa, Artificial Sequence
  Description of Artificial Sequence: targeting sequence/synthetic sequence
LGEKTVFGQELRVGSREAAF

SEQ ID NO: 6576 - protein, 20 aa, Artificial Sequence
  Description of Artificial Sequence: targeting sequence/synthetic sequence
RKLPFQRLVREIAQDFKTDL

SEQ ID NO: 6577 - protein, 20 aa, Artificial Sequence
  Description of Artificial Sequence: targeting sequence/synthetic sequence
LPDSITFSWKYKNNSDISST

SEQ ID NO: 6578 - protein, 20 aa, Artificial Sequence
  Description of Artificial Sequence: targeting sequence/synthetic sequence
TQALPPSQEVNDAIKQMKKH

SEQ ID NO: 6579 - protein, 20 aa, Artificial Sequence
  Description of Artificial Sequence: targeting sequence/synthetic sequence
VMLRKIAVAAASKPAVEIKQ

SEQ ID NO: 6580 - protein, 20 aa, Artificial Sequence
  Description of Artificial Sequence: targeting sequence/synthetic sequence
EDMLGRVFNGSGKPIDRGPV

SEQ ID NO: 6581 - protein, 20 aa, Artificial Sequence
  Description of Artificial Sequence: targeting sequence/synthetic sequence
TVVFDLSAVEPAERPSRARL

SEQ ID NO: 6582 - protein, 20 aa, Artificial Sequence
  Description of Artificial Sequence: targeting sequence/synthetic sequence
SYYQEAKSSKIMESFKNMVP

SEQ ID NO: 6583 - protein, 20 aa, Artificial Sequence
  Description of Artificial Sequence: targeting sequence/synthetic sequence
VMPICLPSKDYAEVGRVGYV

SEQ ID NO: 6584 - protein, 20 aa, Artificial Sequence
  Description of Artificial Sequence: targeting sequence/synthetic sequence
QAQLKVKYLSELKKLNFLEK

SEQ ID NO: 6585 - protein, 20 aa, Artificial Sequence
  Description of Artificial Sequence: targeting sequence/synthetic sequence
DTNLCAIHAKRVTIMPKDIQ

SEQ ID NO: 6586 - protein, 20 aa, Artificial Sequence
  Description of Artificial Sequence: targeting sequence/synthetic sequence
YDQWRAWMQKSHKTRNQDEG

SEQ ID NO: 6587 - protein, 20 aa, Artificial Sequence
  Description of Artificial Sequence: targeting sequence/synthetic sequence
PGTKGTRGPPGASGYPGNPG

SEQ ID NO: 6588 - protein, 20 aa, Artificial Sequence
  Description of Artificial Sequence: targeting sequence/synthetic sequence
GLFEDTNLCVIHAKRVTIMP

SEQ ID NO: 6589 - protein, 20 aa, Artificial Sequence
  Description of Artificial Sequence: targeting sequence/synthetic sequence
LGRVFNGSGKPIDKGPVVMA

SEQ ID NO: 6590 - protein, 20 aa, Artificial Sequence
  Description of Artificial Sequence: targeting sequence/synthetic sequence
SSSNSTREPPASGRVALVKV

SEQ ID NO: 6591 - protein, 20 aa, Artificial Sequence
  Description of Artificial Sequence: targeting sequence/synthetic sequence
TKGTRGPPGASGYPGNPGLP

SEQ ID NO: 6592 - protein, 20 aa, Artificial Sequence
  Description of Artificial Sequence: targeting sequence/synthetic sequence
DRDRERDFKDKRFRREFGDS

SEQ ID NO: 6593 - protein, 20 aa, Artificial Sequence
  Description of Artificial Sequence: targeting sequence/synthetic sequence
AWIKSKTASILGIPMAQKQS

SEQ ID NO: 6594 - protein, 20 aa, Artificial Sequence
  Description of Artificial Sequence: targeting sequence/synthetic sequence
DQWRAWMQKSHKTRNQDEGI

SEQ ID NO: 6595 - protein, 20 aa, Artificial Sequence
  Description of Artificial Sequence: targeting sequence/synthetic sequence
AGAALGVATAAQITAGIALH

SEQ ID NO: 6596 - protein, 20 aa, Artificial Sequence
  Description of Artificial Sequence: targeting sequence/synthetic sequence
DSVDSLRDSPHSERYVSALT

SEQ ID NO: 6597 - protein, 20 aa, Artificial Sequence
  Description of Artificial Sequence: targeting sequence/synthetic sequence
IGTIALGVATSAQITAAVAL

SEQ ID NO: 6598 - protein, 20 aa, Artificial Sequence
  Description of Artificial Sequence: targeting sequence/synthetic sequence
GAEIVYKSPVVSGDTSPRHL

SEQ ID NO: 6599 - protein, 20 aa, Artificial Sequence
  Description of Artificial Sequence: targeting sequence/synthetic sequence
IRKLPFQRLVREIAQDFKTD

SEQ ID NO: 6600 - protein, 20 aa, Artificial Sequence
  Description of Artificial Sequence: targeting sequence/synthetic sequence
WRAWMQKSHKTRNQDEGILP

SEQ ID NO: 6601 - protein, 20 aa, Artificial Sequence
  Description of Artificial Sequence: targeting sequence/synthetic sequence
AGSRGLSDPWADSVGVRPRT

SEQ ID NO: 6602 - protein, 20 aa, Artificial Sequence
  Description of Artificial Sequence: targeting sequence/synthetic sequence
ERDFKDKRFRREFGDSKRVF

SEQ ID NO: 6603 - protein, 20 aa, Artificial Sequence
  Description of Artificial Sequence: targeting sequence/synthetic sequence
ALQEACEAYLVGLFEDTNLC

SEQ ID NO: 6604 - protein, 20 aa, Artificial Sequence
  Description of Artificial Sequence: targeting sequence/synthetic sequence
WIKAKTASILGIPIAQKQSA

SEQ ID NO: 6605 - protein, 20 aa, Artificial Sequence
  Description of Artificial Sequence: targeting sequence/synthetic sequence
QAQLKIDYLTKLKQLNLLEK

SEQ ID NO: 6606 - protein, 20 aa, Artificial Sequence
  Description of Artificial Sequence: targeting sequence/synthetic sequence
MPICLPSKDYAEVGRVGYVS

SEQ ID NO: 6607 - protein, 20 aa, Artificial Sequence
  Description of Artificial Sequence: targeting sequence/synthetic sequence
RLLKNIEDRHPTAPCIQEFL

SEQ ID NO: 6608 - protein, 20 aa, Artificial Sequence
  Description of Artificial Sequence: targeting sequence/synthetic sequence
EDTNLCAIHAKRVTIMLKDI

SEQ ID NO: 6609 - protein, 20 aa, Artificial Sequence
  Description of Artificial Sequence: targeting sequence/synthetic sequence
RGLSDPWADSVGVRPRTTER

SEQ ID NO: 6610 - protein, 20 aa, Artificial Sequence
  Description of Artificial Sequence: targeting sequence/synthetic sequence
FDKARFSGTWYAMAKKDPEG

SEQ ID NO: 6611 - protein, 20 aa, Artificial Sequence
  Description of Artificial Sequence: targeting sequence/synthetic sequence
DSLRDSPHSERYVSALTTPA

SEQ ID NO: 6612 - protein, 20 aa, Artificial Sequence
  Description of Artificial Sequence: targeting sequence/synthetic sequence
KILCEDPLPPIPKDSSRPKA

SEQ ID NO: 6613 - protein, 20 aa, Artificial Sequence
  Description of Artificial Sequence: targeting sequence/synthetic sequence
VYKSPVVSGDTSPRHLSNVS

SEQ ID NO: 6614 - protein, 20 aa, Artificial Sequence
  Description of Artificial Sequence: targeting sequence/synthetic sequence
GRLAEMPADSGYPAYLGARL

SEQ ID NO: 6615 - protein, 20 aa, Artificial Sequence
  Description of Artificial Sequence: targeting sequence/synthetic sequence
EISGRLAEMPADSGYPAYLG

SEQ ID NO: 6616 - protein, 20 aa, Artificial Sequence
  Description of Artificial Sequence: targeting sequence/synthetic sequence
FLPDSITFSWKYKNNSDISS

SEQ ID NO: 6617 - protein, 20 aa, Artificial Sequence
  Description of Artificial Sequence: targeting sequence/synthetic sequence
GEKTVFGQELRVGSREAAFT

SEQ ID NO: 6618 - protein, 20 aa, Artificial Sequence
  Description of Artificial Sequence: targeting sequence/synthetic sequence
WKELTYQEVLSFKPPEPPKP

SEQ ID NO: 6619 - protein, 20 aa, Artificial Sequence
  Description of Artificial Sequence: targeting sequence/synthetic sequence
RFSGTWYAMAKKDPEGLFLQ

SEQ ID NO: 6620 - protein, 20 aa, Artificial Sequence
  Description of Artificial Sequence: targeting sequence/synthetic sequence
VLRGKKADELEKVRLRPGGK

SEQ ID NO: 6621 - protein, 20 aa, Artificial Sequence
  Description of Artificial Sequence: targeting sequence/synthetic sequence
RNSVLRGKKADELEKIRLRP

SEQ ID NO: 6622 - protein, 20 aa, Artificial Sequence
  Description of Artificial Sequence: targeting sequence/synthetic sequence
LYQDIAWFDEKENSTGGLTT

SEQ ID NO: 6623 - protein, 20 aa, Artificial Sequence
  Description of Artificial Sequence: targeting sequence/synthetic sequence
LQKSTHLLIRKLPFSRLARE

SEQ ID NO: 6624 - protein, 20 aa, Artificial Sequence
  Description of Artificial Sequence: targeting sequence/synthetic sequence
KELTYQEVLSFKPPEPPKPP

SEQ ID NO: 6625 - protein, 20 aa, Artificial Sequence
  Description of Artificial Sequence: targeting sequence/synthetic sequence
MLYQDIAWFDEKENSTGGLT

SEQ ID NO: 6626 - protein, 20 aa, Artificial Sequence
  Description of Artificial Sequence: targeting sequence/synthetic sequence
SNRVRVSIQTGTAFQPDAAM

SEQ ID NO: 6627 - protein, 20 aa, Artificial Sequence
  Description of Artificial Sequence: targeting sequence/synthetic sequence
VLGLTKSGGSDRTIAYENKA

SEQ ID NO: 6628 - protein, 20 aa, Artificial Sequence
  Description of Artificial Sequence: targeting sequence/synthetic sequence
TSNVHVSVAGSHSQAANFAA

SEQ ID NO: 6629 - protein, 20 aa, Artificial Sequence
  Description of Artificial Sequence: targeting sequence/synthetic sequence
VHVSVAGSHSQAANFAAQKT

SEQ ID NO: 6630 - protein, 20 aa, Artificial Sequence
  Description of Artificial Sequence: targeting sequence/synthetic sequence
PLPSVTKLTEDRWNEHQKMQ

SEQ ID NO: 6631 - protein, 20 aa, Artificial Sequence
  Description of Artificial Sequence: targeting sequence/synthetic sequence
APIEKTISKTKGQPREPQVY

SEQ ID NO: 6632 - protein, 20 aa, Artificial Sequence
  Description of Artificial Sequence: targeting sequence/synthetic sequence
VKPPLPSVTKLTEDRWNKPQ

SEQ ID NO: 6633 - protein, 20 aa, Artificial Sequence
  Description of Artificial Sequence: targeting sequence/synthetic sequence
KTKADDRGTDEKTSEQTILN

SEQ ID NO: 6634 - protein, 20 aa, Artificial Sequence
  Description of Artificial Sequence: targeting sequence/synthetic sequence
STEYTSGKINLSHQGAYVAQ

SEQ ID NO: 6635 - protein, 20 aa, Artificial Sequence
  Description of Artificial Sequence: targeting sequence/synthetic sequence
KAFLEVNEEGSEAAASTAVV

SEQ ID NO: 6636 - protein, 20 aa, Artificial Sequence
  Description of Artificial Sequence: targeting sequence/synthetic sequence
EKTISKAKGQPREPQVYTLP

SEQ ID NO: 6637 - protein, 20 aa, Artificial Sequence
  Description of Artificial Sequence: targeting sequence/synthetic sequence
TKADDRGTDEKTSEQTILNM

SEQ ID NO: 6638 - protein, 20 aa, Artificial Sequence
  Description of Artificial Sequence: targeting sequence/synthetic sequence
QRILKVLDPLVPTGSENLKS

SEQ ID NO: 6639 - protein, 20 aa, Artificial Sequence
  Description of Artificial Sequence: targeting sequence/synthetic sequence
RKTVTAMDVVYALKRQGRTL

SEQ ID NO: 6640 - protein, 20 aa, Artificial Sequence
  Description of Artificial Sequence: targeting sequence/synthetic sequence
LVEAAASQRSSSLASNRLKI

SEQ ID NO: 6641 - protein, 20 aa, Artificial Sequence
  Description of Artificial Sequence: targeting sequence/synthetic sequence
DHAGTYGLGDRKDQGGYTMH

SEQ ID NO: 6642 - protein, 20 aa, Artificial Sequence
  Description of Artificial Sequence: targeting sequence/synthetic sequence
TFTLRPGEVTALVGPNGSGK

SEQ ID NO: 6643 - protein, 20 aa, Artificial Sequence
  Description of Artificial Sequence: targeting sequence/synthetic sequence
HSGTTLYNPSLESRVTMSVD

SEQ ID NO: 6644 - protein, 20 aa, Artificial Sequence
  Description of Artificial Sequence: targeting sequence/synthetic sequence
RDSAEGNDSYPSGIHLELQR

SEQ ID NO: 6645 - protein, 20 aa, Artificial Sequence
  Description of Artificial Sequence: targeting sequence/synthetic sequence
IGTVHTDLPSQPQLRDKTQP

SEQ ID NO: 6646 - protein, 20 aa, Artificial Sequence
  Description of Artificial Sequence: targeting sequence/synthetic sequence
GQLQPAIQTGTEELRSLYNT

SEQ ID NO: 6647 - protein, 20 aa, Artificial Sequence
  Description of Artificial Sequence: targeting sequence/synthetic sequence
KVLGPLVPTGSENLKSLYNT

SEQ ID NO: 6648 - protein, 20 aa, Artificial Sequence
  Description of Artificial Sequence: targeting sequence/synthetic sequence
PVLGLTKSGGSDRTIAYENK

SEQ ID NO: 6649 - protein, 20 aa, Artificial Sequence
  Description of Artificial Sequence: targeting sequence/synthetic sequence
VNDIFERIASEASRLAHYNK

SEQ ID NO: 6650 - protein, 20 aa, Artificial Sequence
  Description of Artificial Sequence: targeting sequence/synthetic sequence
LGLTKSGGSDRTIAYENKAL

SEQ ID NO: 6651 - protein, 20 aa, Artificial Sequence
  Description of Artificial Sequence: targeting sequence/synthetic sequence
QKILRVLDPLVPTGSENLKS

SEQ ID NO: 6652 - protein, 20 aa, Artificial Sequence
  Description of Artificial Sequence: targeting sequence/synthetic sequence
TGISSKAMGIMNSFVNDIFE

SEQ ID NO: 6653 - protein, 20 aa, Artificial Sequence
  Description of Artificial Sequence: targeting sequence/synthetic sequence
KTDLRFQSAAIGALQEASEA

SEQ ID NO: 6654 - protein, 20 aa, Artificial Sequence
  Description of Artificial Sequence: targeting sequence/synthetic sequence
IFKFNETAPVPTIPPLDTKI

SEQ ID NO: 6655 - protein, 20 aa, Artificial Sequence
  Description of Artificial Sequence: targeting sequence/synthetic sequence
EASRLAHYNKRSTITSREIQ

SEQ ID NO: 6656 - protein, 20 aa, Artificial Sequence
  Description of Artificial Sequence: targeting sequence/synthetic sequence
TNLCAIHAKRVTIMPKDIQL

SEQ ID NO: 6657 - protein, 20 aa, Artificial Sequence
  Description of Artificial Sequence: targeting sequence/synthetic sequence
HKAFLEVNEEGSEAAASTAV

SEQ ID NO: 6658 - protein, 20 aa, Artificial Sequence
  Description of Artificial Sequence: targeting sequence/synthetic sequence
SNCRHERDAGVVCTNETRST

SEQ ID NO: 6659 - protein, 20 aa, Artificial Sequence
  Description of Artificial Sequence: targeting sequence/synthetic sequence
TGEAQSRWPRRGGSGAMAEA

SEQ ID NO: 6660 - protein, 20 aa, Artificial Sequence
  Description of Artificial Sequence: targeting sequence/synthetic sequence
LNKLLGGVTIAQGGVLPNIQ

SEQ ID NO: 6661 - protein, 20 aa, Artificial Sequence
  Description of Artificial Sequence: targeting sequence/synthetic sequence
VKILPEVKEKHEFLNRLKQL

SEQ ID NO: 6662 - protein, 20 aa, Artificial Sequence
  Description of Artificial Sequence: targeting sequence/synthetic sequence
TFFDANKTGQLVSRLTTDVQ

SEQ ID NO: 6663 - protein, 20 aa, Artificial Sequence
  Description of Artificial Sequence: targeting sequence/synthetic sequence
RFQSAAIGALQEASEAYLVG

SEQ ID NO: 6664 - protein, 20 aa, Artificial Sequence
  Description of Artificial Sequence: targeting sequence/synthetic sequence
NTTPPMLDSDGSFFLYSKLT

SEQ ID NO: 6665 - protein, 20 aa, Artificial Sequence
  Description of Artificial Sequence: targeting sequence/synthetic sequence
IPYREDKNLTGTARYASINA

SEQ ID NO: 6666 - protein, 20 aa, Artificial Sequence
  Description of Artificial Sequence: targeting sequence/synthetic sequence
LGGVTIAQGGVLPNIQAVLL

SEQ ID NO: 6667 - protein, 20 aa, Artificial Sequence
  Description of Artificial Sequence: targeting sequence/synthetic sequence
TTSTEYTSGKINLSHQGAYV

SEQ ID NO: 6668 - protein, 20 aa, Artificial Sequence
  Description of Artificial Sequence: targeting sequence/synthetic sequence
GTVHTDLPSQPQLRDKTQPH

SEQ ID NO: 6669 - protein, 20 aa, Artificial Sequence
  Description of Artificial Sequence: targeting sequence/synthetic sequence
SYSSGHVHLSSENKFQNSAI

SEQ ID NO: 6670 - protein, 20 aa, Artificial Sequence
  Description of Artificial Sequence: targeting sequence/synthetic sequence
LNPAGYLLGKINLKALAALA

SEQ ID NO: 6671 - protein, 20 aa, Artificial Sequence
  Description of Artificial Sequence: targeting sequence/synthetic sequence
VHDILDRIATEAGHLARSTK

SEQ ID NO: 6672 - protein, 20 aa, Artificial Sequence
  Description of Artificial Sequence: targeting sequence/synthetic sequence
LLADITSKYRQGDRKGQIKE

SEQ ID NO: 6673 - protein, 20 aa, Artificial Sequence
  Description of Artificial Sequence: targeting sequence/synthetic sequence
PVACTQRLPTAADLLQIRSY

SEQ ID NO: 6674 - protein, 20 aa, Artificial Sequence
  Description of Artificial Sequence: targeting sequence/synthetic sequence
LPVACTQRLPTAADLLQIRS

SEQ ID NO: 6675 - protein, 20 aa, Artificial Sequence
  Description of Artificial Sequence: targeting sequence/synthetic sequence
EDQSLENSEADVKESRKDVL

SEQ ID NO: 6676 - protein, 20 aa, Artificial Sequence
  Description of Artificial Sequence: targeting sequence/synthetic sequence
RILKVLDPLVPTGSENLKSL

SEQ ID NO: 6677 - protein, 20 aa, Artificial Sequence
  Description of Artificial Sequence: targeting sequence/synthetic sequence
DQSLENSEADVKESRKDVLP

SEQ ID NO: 6678 - protein, 20 aa, Artificial Sequence
  Description of Artificial Sequence: targeting sequence/synthetic sequence
FEDTNLCAIHAKRVTIMPKD

SEQ ID NO: 6679 - protein, 20 aa, Artificial Sequence
  Description of Artificial Sequence: targeting sequence/synthetic sequence
RRVVQREKRAVGLGAVFFGF

SEQ ID NO: 6680 - protein, 20 aa, Artificial Sequence
  Description of Artificial Sequence: targeting sequence/synthetic sequence
HCAQTEVIATLKNGKKACLN

SEQ ID NO: 6681 - protein, 20 aa, Artificial Sequence
  Description of Artificial Sequence: targeting sequence/synthetic sequence
VLPNIQAVLLPKKTESHHKA

SEQ ID NO: 6682 - protein, 20 aa, Artificial Sequence
  Description of Artificial Sequence: targeting sequence/synthetic sequence
CKIIPEAKDKVEFLTKLKQL

SEQ ID NO: 6683 - protein, 20 aa, Artificial Sequence
  Description of Artificial Sequence: targeting sequence/synthetic sequence
KIEKNGKNVHVIGTHTQSED

SEQ ID NO: 6684 - protein, 20 aa, Artificial Sequence
  Description of Artificial Sequence: targeting sequence/synthetic sequence
AGEASRLAHYNKRSTITSRE

SEQ ID NO: 6685 - protein, 20 aa, Artificial Sequence
  Description of Artificial Sequence: targeting sequence/synthetic sequence
VLETGGEAGITRSVVATTRA

SEQ ID NO: 6686 - protein, 20 aa, Artificial Sequence
  Description of Artificial Sequence: targeting sequence/synthetic sequence
ALALLADITSKYRQGDRKGQ

SEQ ID NO: 6687 - protein, 20 aa, Artificial Sequence
  Description of Artificial Sequence: targeting sequence/synthetic sequence
QTGTEELRSLYNTVATLYCV

SEQ ID NO: 6688 - protein, 20 aa, Artificial Sequence
  Description of Artificial Sequence: targeting sequence/synthetic sequence
VGGKKEYLIAGKAEGDGKMH

SEQ ID NO: 6689 - protein, 20 aa, Artificial Sequence
  Description of Artificial Sequence: targeting sequence/synthetic sequence
RPKVCVLGSREQLCIHPEVK

SEQ ID NO: 6690 - protein, 20 aa, Artificial Sequence
  Description of Artificial Sequence: targeting sequence/synthetic sequence
EKNGKNVHVIGTHTQSEDSR

SEQ ID NO: 6691 - protein, 20 aa, Artificial Sequence
  Description of Artificial Sequence: targeting sequence/synthetic sequence
HAGTYGLGDRKDQGGYTMHQ

SEQ ID NO: 6692 - protein, 20 aa, Artificial Sequence
  Description of Artificial Sequence: targeting sequence/synthetic sequence
QIQPAIKTGTEELKSLFNLV

SEQ ID NO: 6693 - protein, 20 aa, Artificial Sequence
  Description of Artificial Sequence: targeting sequence/synthetic sequence
SRLAHYNKRSTITSREIQTA

SEQ ID NO: 6694 - protein, 20 aa, Artificial Sequence
  Description of Artificial Sequence: targeting sequence/synthetic sequence
VVLLTEMCERSPDMLAHFRK

SEQ ID NO: 6695 - protein, 20 aa, Artificial Sequence
  Description of Artificial Sequence: targeting sequence/synthetic sequence
VGLIRNLALCPANHAPLREQ

SEQ ID NO: 6696 - protein, 20 aa, Artificial Sequence
  Description of Artificial Sequence: targeting sequence/synthetic sequence
IIPRHLQLAIRNDEELNKLL

SEQ ID NO: 6697 - protein, 20 aa, Artificial Sequence
  Description of Artificial Sequence: targeting sequence/synthetic sequence
VVLETGGEAGITRSVVATTR

SEQ ID NO: 6698 - protein, 20 aa, Artificial Sequence
  Description of Artificial Sequence: targeting sequence/synthetic sequence
ENNYKTTPPVLDSDGSFFLY

SEQ ID NO: 6699 - protein, 20 aa, Artificial Sequence
  Description of Artificial Sequence: targeting sequence/synthetic sequence
EASEAYLVGLFEDTNLCAIH

SEQ ID NO: 6700 - protein, 20 aa, Artificial Sequence
  Description of Artificial Sequence: targeting sequence/synthetic sequence
NVSPRDSAEGNDSYPSGIHL

SEQ ID NO: 6701 - protein, 20 aa, Artificial Sequence
  Description of Artificial Sequence: targeting sequence/synthetic sequence
LKQKVSQYYGIPMAERQNDS

SEQ ID NO: 6702 - protein, 20 aa, Artificial Sequence
  Description of Artificial Sequence: targeting sequence/synthetic sequence
FSVGSTLYPESRKLLKSWHL

SEQ ID NO: 6703 - protein, 20 aa, Artificial Sequence
  Description of Artificial Sequence: targeting sequence/synthetic sequence
KSNCRHERDAGVVCTNETRS

SEQ ID NO: 6704 - protein, 20 aa, Artificial Sequence
  Description of Artificial Sequence: targeting sequence/synthetic sequence
LTFTLRPGEVTALVGPNGSG

SEQ ID NO: 6705 - protein, 20 aa, Artificial Sequence
  Description of Artificial Sequence: targeting sequence/synthetic sequence
NSFVNDIFERIAGEASRLAH

SEQ ID NO: 6706 - protein, 20 aa, Artificial Sequence
  Description of Artificial Sequence: targeting sequence/synthetic sequence
SSLLRQDITFFDANKTGQLV

SEQ ID NO: 6707 - protein, 20 aa, Artificial Sequence
  Description of Artificial Sequence: targeting sequence/synthetic sequence
SPGPHCAQTEVIATLKNGQK

SEQ ID NO: 6708 - protein, 20 aa, Artificial Sequence
  Description of Artificial Sequence: targeting sequence/synthetic sequence
KQKVSQYYGIPMAERQNNRW

SEQ ID NO: 6709 - protein, 20 aa, Artificial Sequence
  Description of Artificial Sequence: targeting sequence/synthetic sequence
MFSVGSTLYIESRRLLKSWH

SEQ ID NO: 6710 - protein, 20 aa, Artificial Sequence
  Description of Artificial Sequence: targeting sequence/synthetic sequence
VGVSIRTNTAFQPDAAMISL

SEQ ID NO: 6711 - protein, 20 aa, Artificial Sequence
  Description of Artificial Sequence: targeting sequence/synthetic sequence
LEYLTAEILELAGNAARDNK

SEQ ID NO: 6712 - protein, 20 aa, Artificial Sequence
  Description of Artificial Sequence: targeting sequence/synthetic sequence
LLGRVTIAQGGVLPNIQAVL

SEQ ID NO: 6713 - protein, 20 aa, Artificial Sequence
  Description of Artificial Sequence: targeting sequence/synthetic sequence
PIIPVLLPKYIGLDPISPGD

SEQ ID NO: 6714 - protein, 20 aa, Artificial Sequence
  Description of Artificial Sequence: targeting sequence/synthetic sequence
SLRDSPHSERYVSALTTPAR

SEQ ID NO: 6715 - protein, 20 aa, Artificial Sequence
  Description of Artificial Sequence: targeting sequence/synthetic sequence
RQRRALERGLQDEDGYRMKF

SEQ ID NO: 6716 - protein, 20 aa, Artificial Sequence
  Description of Artificial Sequence: targeting sequence/synthetic sequence
AASAISVARTLLVFEVQQPF

SEQ ID NO: 6717 - protein, 20 aa, Artificial Sequence
  Description of Artificial Sequence: targeting sequence/synthetic sequence
FQRLVREIAQDFKTDLRFQS

SEQ ID NO: 6718 - protein, 20 aa, Artificial Sequence
  Description of Artificial Sequence: targeting sequence/synthetic sequence
GGVLPNIQAVLLPKKTESHH

SEQ ID NO: 6719 - protein, 20 aa, Artificial Sequence
  Description of Artificial Sequence: targeting sequence/synthetic sequence
LCAIHAKRVTIMPKDIQLAR

SEQ ID NO: 6720 - protein, 20 aa, Artificial Sequence
  Description of Artificial Sequence: targeting sequence/synthetic sequence
ASLGSAPRSPAPREGPPPVL

SEQ ID NO: 6721 - protein, 20 aa, Artificial Sequence
  Description of Artificial Sequence: targeting sequence/synthetic sequence
IPYRENKNLTGTARYASINT

SEQ ID NO: 6722 - protein, 20 aa, Artificial Sequence
  Description of Artificial Sequence: targeting sequence/synthetic sequence
FKTDLRFQSSAVMALQEACE

SEQ ID NO: 6723 - protein, 20 aa, Artificial Sequence
  Description of Artificial Sequence: targeting sequence/synthetic sequence
YIFHSGTTLYNPSLESRVTM

SEQ ID NO: 6724 - protein, 20 aa, Artificial Sequence
  Description of Artificial Sequence: targeting sequence/synthetic sequence
TVCLKAGLETTAWTKFSHLA

SEQ ID NO: 6725 - protein, 20 aa, Artificial Sequence
  Description of Artificial Sequence: targeting sequence/synthetic sequence
FTEACNAARGLEWIGNKISK

SEQ ID NO: 6726 - protein, 20 aa, Artificial Sequence
  Description of Artificial Sequence: targeting sequence/synthetic sequence
VVVTVCLKAGLETTAWTKFS

SEQ ID NO: 6727 - protein, 20 aa, Artificial Sequence
  Description of Artificial Sequence: targeting sequence/synthetic sequence
KTRIIPRHLQLAIRNDEELN

SEQ ID NO: 6728 - protein, 20 aa, Artificial Sequence
  Description of Artificial Sequence: targeting sequence/synthetic sequence
RAVSEHQLLHDKGKSIQDLR

SEQ ID NO: 6729 - protein, 20 aa, Artificial Sequence
  Description of Artificial Sequence: targeting sequence/synthetic sequence
KVCVLGSREQLCIHPEVKKQ

SEQ ID NO: 6730 - protein, 20 aa, Artificial Sequence
  Description of Artificial Sequence: targeting sequence/synthetic sequence
KGNYSERVGAGAPVYLAAVL

SEQ ID NO: 6731 - protein, 20 aa, Artificial Sequence
  Description of Artificial Sequence: targeting sequence/synthetic sequence
AVSEHQLLHDKGKSIQDLRR

SEQ ID NO: 6732 - protein, 20 aa, Artificial Sequence
  Description of Artificial Sequence: targeting sequence/synthetic sequence
IAGEASRLAHYNKRSTITSR

SEQ ID NO: 6733 - protein, 20 aa, Artificial Sequence
  Description of Artificial Sequence: targeting sequence/synthetic sequence
CAQTEVIATLKNGRKACLNP

SEQ ID NO: 6734 - protein, 20 aa, Artificial Sequence
  Description of Artificial Sequence: targeting sequence/synthetic sequence
ACEAYLVGLFEDTNLCAIHA

SEQ ID NO: 6735 - protein, 20 aa, Artificial Sequence
  Description of Artificial Sequence: targeting sequence/synthetic sequence
LGKVTIAQGGVLPNIQAVLL

SEQ ID NO: 6736 - protein, 20 aa, Artificial Sequence
  Description of Artificial Sequence: targeting sequence/synthetic sequence
GRVTIAQGGVLPNIQAVLLP

SEQ ID NO: 6737 - protein, 20 aa, Artificial Sequence
  Description of Artificial Sequence: targeting sequence/synthetic sequence
PKKIKPPLPSVRKLVEDRWN

SEQ ID NO: 6738 - protein, 20 aa, Artificial Sequence
  Description of Artificial Sequence: targeting sequence/synthetic sequence
KKEYLIAGKAEGDGKMHITL

SEQ ID NO: 6739 - protein, 20 aa, Artificial Sequence
  Description of Artificial Sequence: targeting sequence/synthetic sequence
TVTAMDVVYALKRQGRTLYG

SEQ ID NO: 6740 - protein, 20 aa, Artificial Sequence
  Description of Artificial Sequence: targeting sequence/synthetic sequence
FERIASEASRLAHYNKRSTI

SEQ ID NO: 6741 - protein, 20 aa, Artificial Sequence
  Description of Artificial Sequence: targeting sequence/synthetic sequence
AAVLEYLTAEILELAGNAAR

SEQ ID NO: 6742 - protein, 20 aa, Artificial Sequence
  Description of Artificial Sequence: targeting sequence/synthetic sequence
LGMYLEFQYSFEMCLKCIKK

SEQ ID NO: 6743 - protein, 20 aa, Artificial Sequence
  Description of Artificial Sequence: targeting sequence/synthetic sequence
LLLLGMYLEFQYSFEMCLKC

SEQ ID NO: 6744 - protein, 20 aa, Artificial Sequence
  Description of Artificial Sequence: targeting sequence/synthetic sequence
QALTGEAQSRWPRRGGSGAM

SEQ ID NO: 6745 - protein, 20 aa, Artificial Sequence
  Description of Artificial Sequence: targeting sequence/synthetic sequence
ELDSLIKATIAGGGVIPHIH

SEQ ID NO: 6746 - protein, 20 aa, Artificial Sequence
  Description of Artificial Sequence: targeting sequence/synthetic sequence
KATVGLIRNLALCPANHAPL

SEQ ID NO: 6747 - protein, 20 aa, Artificial Sequence
  Description of Artificial Sequence: targeting sequence/synthetic sequence
HIPYRENKNLTGTARYASIN

SEQ ID NO: 6748 - protein, 20 aa, Artificial Sequence
  Description of Artificial Sequence: targeting sequence/synthetic sequence
VTAMDVVYALKRQGRTLYGF

SEQ ID NO: 6749 - protein, 20 aa, Artificial Sequence
  Description of Artificial Sequence: targeting sequence/synthetic sequence
CVVVDVSHEDPEVKFNWYVD

SEQ ID NO: 6750 - protein, 20 aa, Artificial Sequence
  Description of Artificial Sequence: targeting sequence/synthetic sequence
KLPFQRLVREIAQDFKTDLR

SEQ ID NO: 6751 - protein, 20 aa, Artificial Sequence
  Description of Artificial Sequence: targeting sequence/synthetic sequence
FSYSSGHVHLSSENKFQNSA

SEQ ID NO: 6752 - protein, 20 aa, Artificial Sequence
  Description of Artificial Sequence: targeting sequence/synthetic sequence
RQDITFFDANKTGQLVSRLT

SEQ ID NO: 6753 - protein, 20 aa, Artificial Sequence
  Description of Artificial Sequence: targeting sequence/synthetic sequence
QRYEIKMTKMYKGFQALGDA

SEQ ID NO: 6754 - protein, 20 aa, Artificial Sequence
  Description of Artificial Sequence: targeting sequence/synthetic sequence
FTEMTNACKGMEWIAIKIQK

SEQ ID NO: 6755 - protein, 20 aa, Artificial Sequence
  Description of Artificial Sequence: targeting sequence/synthetic sequence
LKTGSEELTSLYNTVATLYC

SEQ ID NO: 6756 - protein, 20 aa, Artificial Sequence
  Description of Artificial Sequence: targeting sequence/synthetic sequence
LLTEMCERSPDMLAHFRKNE

SEQ ID NO: 6757 - protein, 20 aa, Artificial Sequence
  Description of Artificial Sequence: targeting sequence/synthetic sequence
PCNLTRYNKELSMVKIPSKT

SEQ ID NO: 6758 - protein, 20 aa, Artificial Sequence
  Description of Artificial Sequence: targeting sequence/synthetic sequence
LGSREQLCIHPEVKKQESNH

SEQ ID NO: 6759 - protein, 20 aa, Artificial Sequence
  Description of Artificial Sequence: targeting sequence/synthetic sequence
VGLFEDTNLCAIHAKRVTIM

SEQ ID NO: 6760 - protein, 20 aa, Artificial Sequence
  Description of Artificial Sequence: targeting sequence/synthetic sequence
LDSLIKATIAGGGVIPHIHK

SEQ ID NO: 6761 - protein, 20 aa, Artificial Sequence
  Description of Artificial Sequence: targeting sequence/synthetic sequence
FVNDIFERIAGEASRLAHYN

SEQ ID NO: 6762 - protein, 20 aa, Artificial Sequence
  Description of Artificial Sequence: targeting sequence/synthetic sequence
NYAERIGAGAPVYLAAVLEY

SEQ ID NO: 6763 - protein, 20 aa, Artificial Sequence
  Description of Artificial Sequence: targeting sequence/synthetic sequence
YTINLIIPCLLISCLTVLVF

SEQ ID NO: 6764 - protein, 20 aa, Artificial Sequence
  Description of Artificial Sequence: targeting sequence/synthetic sequence
EVTCVVVDVSHEDPEVKFNW

SEQ ID NO: 6765 - protein, 20 aa, Artificial Sequence
  Description of Artificial Sequence: targeting sequence/synthetic sequence
QPIIPVLLPKYIGLDPISPG

SEQ ID NO: 6766 - protein, 20 aa, Artificial Sequence
  Description of Artificial Sequence: targeting sequence/synthetic sequence
TINLIIPCLLISCLTVLVFY

SEQ ID NO: 6767 - protein, 20 aa, Artificial Sequence
  Description of Artificial Sequence: targeting sequence/synthetic sequence
DTISEKTSDQIHFFFAKLNC

SEQ ID NO: 6768 - protein, 20 aa, Artificial Sequence
  Description of Artificial Sequence: targeting sequence/synthetic sequence
SIQTGTAFQPDAAMISLENN

SEQ ID NO: 6769 - protein, 20 aa, Artificial Sequence
  Description of Artificial Sequence: targeting sequence/synthetic sequence
GSAPRSPAPREGPPPVLASP

SEQ ID NO: 6770 - protein, 20 aa, Artificial Sequence
  Description of Artificial Sequence: targeting sequence/synthetic sequence
RDSPHSERYVSALTTPARLS

SEQ ID NO: 6771 - protein, 20 aa, Artificial Sequence
  Description of Artificial Sequence: targeting sequence/synthetic sequence
LCRTPCNLTRYNKELSMVKI

SEQ ID NO: 6772 - protein, 20 aa, Artificial Sequence
  Description of Artificial Sequence: targeting sequence/synthetic sequence
NPPGYLLGKINLKALAALAK

SEQ ID NO: 6773 - protein, 20 aa, Artificial Sequence
  Description of Artificial Sequence: targeting sequence/synthetic sequence
VNGNNIRGMMKELLYFLDSC

SEQ ID NO: 6774 - protein, 20 aa, Artificial Sequence
  Description of Artificial Sequence: targeting sequence/synthetic sequence
RALERGLQDEDGYRMKFACY

SEQ ID NO: 6775 - protein, 20 aa, Artificial Sequence
  Description of Artificial Sequence: targeting sequence/synthetic sequence
VCEMPCNLTRYGKELSMVKI

SEQ ID NO: 6776 - protein, 20 aa, Artificial Sequence
  Description of Artificial Sequence: targeting sequence/synthetic sequence
EAAAASAISVARTLLVFEVQ

SEQ ID NO: 6777 - protein, 20 aa, Artificial Sequence
  Description of Artificial Sequence: targeting sequence/synthetic sequence
RLQSGEEEEEQIHSTGLEYP

SEQ ID NO: 6778 - protein, 20 aa, Artificial Sequence
  Description of Artificial Sequence: targeting sequence/synthetic sequence
NLCAIHAKRVTIMPKDIQLA

SEQ ID NO: 6779 - protein, 20 aa, Artificial Sequence
  Description of Artificial Sequence: targeting sequence/synthetic sequence
YQRYEIKMTKMYKGFQALGD

SEQ ID NO: 6780 - protein, 20 aa, Artificial Sequence
  Description of Artificial Sequence: targeting sequence/synthetic sequence
FALVNGNNIRGMMKELLYFL

SEQ ID NO: 6781 - protein, 20 aa, Artificial Sequence
  Description of Artificial Sequence: targeting sequence/synthetic sequence
VQREKRAAGLGALFLGFLGD

SEQ ID NO: 6782 - protein, 20 aa, Artificial Sequence
  Description of Artificial Sequence: targeting sequence/synthetic sequence
CEAYLVGLFEDTNLCAIHAK

SEQ ID NO: 6783 - protein, 20 aa, Artificial Sequence
  Description of Artificial Sequence: targeting sequence/synthetic sequence
EKTSDQIHFFFAKLNCRLYR

SEQ ID NO: 6784 - protein, 20 aa, Artificial Sequence
  Description of Artificial Sequence: targeting sequence/synthetic sequence
GGVCPAILKKCRRDSDCPGA

SEQ ID NO: 6785 - protein, 20 aa, Artificial Sequence
  Description of Artificial Sequence: targeting sequence/synthetic sequence
SGEEEEEQIHSTGLEYPERP

SEQ ID NO: 6786 - protein, 20 aa, Artificial Sequence
  Description of Artificial Sequence: targeting sequence/synthetic sequence
PKILKKCRRDSDCPGACICR

SEQ ID NO: 6787 - protein, 20 aa, Artificial Sequence
  Description of Artificial Sequence: targeting sequence/synthetic sequence
HSGSTTYNPSLKSRVTLSLD

SEQ ID NO: 6788 - protein, 20 aa, Artificial Sequence
  Description of Artificial Sequence: targeting sequence/synthetic sequence
VLKQVHPDTGISSKAMSIMN

SEQ ID NO: 6789 - protein, 20 aa, Artificial Sequence
  Description of Artificial Sequence: targeting sequence/synthetic sequence
EINHSGSTNYNPSLKSRVTI

SEQ ID NO: 6790 - protein, 20 aa, Artificial Sequence
  Description of Artificial Sequence: targeting sequence/synthetic sequence
YVYKVLKQVHPDTGISSKAM

SEQ ID NO: 6791 - protein, 20 aa, Artificial Sequence
  Description of Artificial Sequence: targeting sequence/synthetic sequence
GEIYHSGSTNYNPSLKSRVT

SEQ ID NO: 6792 - protein, 20 aa, Artificial Sequence
  Description of Artificial Sequence: targeting sequence/synthetic sequence
VYVYKVLKQVHPDTGISSKA

SEQ ID NO: 6793 - protein, 20 aa, Artificial Sequence
  Description of Artificial Sequence: targeting sequence/synthetic sequence
RGDEVRQIAPGQTGKIADYN

SEQ ID NO: 6794 - protein, 20 aa, Artificial Sequence
  Description of Artificial Sequence: targeting sequence/synthetic sequence
IDVRNSTQHLGPVHREKAEI

SEQ ID NO: 6795 - protein, 20 aa, Artificial Sequence
  Description of Artificial Sequence: targeting sequence/synthetic sequence
TSHHDQDHPTFNKITPNLAE

SEQ ID NO: 6796 - protein, 20 aa, Artificial Sequence
  Description of Artificial Sequence: targeting sequence/synthetic sequence
RFVQNALNGNGDPNNMDKAV

SEQ ID NO: 6797 - protein, 20 aa, Artificial Sequence
  Description of Artificial Sequence: targeting sequence/synthetic sequence
SPANGSLGPTLNLSSGESRL

SEQ ID NO: 6798 - protein, 20 aa, Artificial Sequence
  Description of Artificial Sequence: targeting sequence/synthetic sequence
TDLIQANPKQGALAKKSSQT

SEQ ID NO: 6799 - protein, 20 aa, Artificial Sequence
  Description of Artificial Sequence: targeting sequence/synthetic sequence
QDTQEKLNHQLEGLTFQMKK

SEQ ID NO: 6800 - protein, 20 aa, Artificial Sequence
  Description of Artificial Sequence: targeting sequence/synthetic sequence
QRQGTQAESNLSSKFQFSSN

SEQ ID NO: 6801 - protein, 20 aa, Artificial Sequence
  Description of Artificial Sequence: targeting sequence/synthetic sequence
LENEIPKTSGSEMANKRMKV

SEQ ID NO: 6802 - protein, 20 aa, Artificial Sequence
  Description of Artificial Sequence: targeting sequence/synthetic sequence
SEVSTDLIQANPKQGALAKK

SEQ ID NO: 6803 - protein, 20 aa, Artificial Sequence
  Description of Artificial Sequence: targeting sequence/synthetic sequence
NHTSGAGLVQINKSNGKETV

SEQ ID NO: 6804 - protein, 20 aa, Artificial Sequence
  Description of Artificial Sequence: targeting sequence/synthetic sequence
SSRGTTGNTQVQSPSNATTA

SEQ ID NO: 6805 - protein, 20 aa, Artificial Sequence
  Description of Artificial Sequence: targeting sequence/synthetic sequence
QIIKQLQPALQTGTEELKSL

SEQ ID NO: 6806 - protein, 20 aa, Artificial Sequence
  Description of Artificial Sequence: targeting sequence/synthetic sequence
PHANEVSQKIGDNLRELQQR

SEQ ID NO: 6807 - protein, 20 aa, Artificial Sequence
  Description of Artificial Sequence: targeting sequence/synthetic sequence
SERSSSSSSSSSESGSSSRS

SEQ ID NO: 6808 - protein, 20 aa, Artificial Sequence
  Description of Artificial Sequence: targeting sequence/synthetic sequence
PDRNATTLGLPNNSNNSSLL

SEQ ID NO: 6809 - protein, 20 aa, Artificial Sequence
  Description of Artificial Sequence: targeting sequence/synthetic sequence
NGEAVKTHTNISESHPNATF

SEQ ID NO: 6810 - protein, 20 aa, Artificial Sequence
  Description of Artificial Sequence: targeting sequence/synthetic sequence
SSLPTTNSTTNSATKITANT

SEQ ID NO: 6811 - protein, 20 aa, Artificial Sequence
  Description of Artificial Sequence: targeting sequence/synthetic sequence
VVFSNDHSSGTKETRLELRE

SEQ ID NO: 6812 - protein, 20 aa, Artificial Sequence
  Description of Artificial Sequence: targeting sequence/synthetic sequence
TDTSHHDQDHPTFNKITPNL

SEQ ID NO: 6813 - protein, 20 aa, Artificial Sequence
  Description of Artificial Sequence: targeting sequence/synthetic sequence
ARLENEIPKTSGSEMANKRM

SEQ ID NO: 6814 - protein, 20 aa, Artificial Sequence
  Description of Artificial Sequence: targeting sequence/synthetic sequence
REAGNHTSGAGLVQINKSNG

SEQ ID NO: 6815 - protein, 20 aa, Artificial Sequence
  Description of Artificial Sequence: targeting sequence/synthetic sequence
LSLPKPQSNLPDTKASGPAH

SEQ ID NO: 6816 - protein, 20 aa, Artificial Sequence
  Description of Artificial Sequence: targeting sequence/synthetic sequence
VISNALQLSQPKPQKQLTAQ

SEQ ID NO: 6817 - protein, 20 aa, Artificial Sequence
  Description of Artificial Sequence: targeting sequence/synthetic sequence
YFSQLSNNAKEAVEHLQKSE

SEQ ID NO: 6818 - protein, 20 aa, Artificial Sequence
  Description of Artificial Sequence: targeting sequence/synthetic sequence
QAQLVESGGGVVQPGSSLRL

SEQ ID NO: 6819 - protein, 20 aa, Artificial Sequence
  Description of Artificial Sequence: targeting sequence/synthetic sequence
GNHTSGAGLVQINKSNGKET

SEQ ID NO: 6820 - protein, 20 aa, Artificial Sequence
  Description of Artificial Sequence: targeting sequence/synthetic sequence
TQETIDRLAGKPTHVNVSVV

SEQ ID NO: 6821 - protein, 20 aa, Artificial Sequence
  Description of Artificial Sequence: targeting sequence/synthetic sequence
ARLLPHANEVSQKIGDNLRE

SEQ ID NO: 6822 - protein, 20 aa, Artificial Sequence
  Description of Artificial Sequence: targeting sequence/synthetic sequence
IRGDEVRQIAPGQTGKIADY

SEQ ID NO: 6823 - protein, 20 aa, Artificial Sequence
  Description of Artificial Sequence: targeting sequence/synthetic sequence
TMPNHSETISHTVNVPLQTT

SEQ ID NO: 6824 - protein, 20 aa, Artificial Sequence
  Description of Artificial Sequence: targeting sequence/synthetic sequence
AVINGSQHPSSSSSVNDVSS

SEQ ID NO: 6825 - protein, 20 aa, Artificial Sequence
  Description of Artificial Sequence: targeting sequence/synthetic sequence
ANGSLGPTLNLSSGESRLLA

SEQ ID NO: 6826 - protein, 20 aa, Artificial Sequence
  Description of Artificial Sequence: targeting sequence/synthetic sequence
EGAEPLKQRVEASISKANSF

SEQ ID NO: 6827 - protein, 20 aa, Artificial Sequence
  Description of Artificial Sequence: targeting sequence/synthetic sequence
DTVISNALQLSQPKPQKQLT

SEQ ID NO: 6828 - protein, 20 aa, Artificial Sequence
  Description of Artificial Sequence: targeting sequence/synthetic sequence
RNLEQLGGTVTNPGGSGTSS

SEQ ID NO: 6829 - protein, 20 aa, Artificial Sequence
  Description of Artificial Sequence: targeting sequence/synthetic sequence
ILAQVATNTETSKNVGNAIL

SEQ ID NO: 6830 - protein, 20 aa, Artificial Sequence
  Description of Artificial Sequence: targeting sequence/synthetic sequence
DTSHHDQDHPTFNKITPNLA

SEQ ID NO: 6831 - protein, 20 aa, Artificial Sequence
  Description of Artificial Sequence: targeting sequence/synthetic sequence
AQLVESGGGVVQPGSSLRLS

SEQ ID NO: 6832 - protein, 20 aa, Artificial Sequence
  Description of Artificial Sequence: targeting sequence/synthetic sequence
PSTQFDAAHPTNVQRLAEPS

SEQ ID NO: 6833 - protein, 20 aa, Artificial Sequence
  Description of Artificial Sequence: targeting sequence/synthetic sequence
ISNALQLSQPKPQKQLTAQS

SEQ ID NO: 6834 - protein, 20 aa, Artificial Sequence
  Description of Artificial Sequence: targeting sequence/synthetic sequence
QLGQETDKLKTRNRESISLL

SEQ ID NO: 6835 - protein, 20 aa, Artificial Sequence
  Description of Artificial Sequence: targeting sequence/synthetic sequence
NQQEGIITVTDMKGNNSHIL

SEQ ID NO: 6836 - protein, 20 aa, Artificial Sequence
  Description of Artificial Sequence: targeting sequence/synthetic sequence
EEVNVIPPHTPVRTVMNTIQ

SEQ ID NO: 6837 - protein, 20 aa, Artificial Sequence
  Description of Artificial Sequence: targeting sequence/synthetic sequence
IDTVISNALQLSQPKPQKQL

SEQ ID NO: 6838 - protein, 20 aa, Artificial Sequence
  Description of Artificial Sequence: targeting sequence/synthetic sequence
RGTTGNTQVQSPSNATTATG

SEQ ID NO: 6839 - protein, 20 aa, Artificial Sequence
  Description of Artificial Sequence: targeting sequence/synthetic sequence
VLNEVLVVPNIKESHHTTSN

SEQ ID NO: 6840 - protein, 20 aa, Artificial Sequence
  Description of Artificial Sequence: targeting sequence/synthetic sequence
LDGETNLKIRQGLSHTADMQ

SEQ ID NO: 6841 - protein, 20 aa, Artificial Sequence
  Description of Artificial Sequence: targeting sequence/synthetic sequence
EFSVDETGQMSATAKGRVRL

SEQ ID NO: 6842 - protein, 20 aa, Artificial Sequence
  Description of Artificial Sequence: targeting sequence/synthetic sequence
TTGNTQVQSPSNATTATGVF

SEQ ID NO: 6843 - protein, 20 aa, Artificial Sequence
  Description of Artificial Sequence: targeting sequence/synthetic sequence
SVDETGQMSATAKGRVRLLN

SEQ ID NO: 6844 - protein, 20 aa, Artificial Sequence
  Description of Artificial Sequence: targeting sequence/synthetic sequence
AGQRQGTQAESNLSSKFQFS

SEQ ID NO: 6845 - protein, 20 aa, Artificial Sequence
  Description of Artificial Sequence: targeting sequence/synthetic sequence
QSLTQGDGVAKLSINTHPSQ

SEQ ID NO: 6846 - protein, 20 aa, Artificial Sequence
  Description of Artificial Sequence: targeting sequence/synthetic sequence
SLPKPQSNLPDTKASGPAHS

SEQ ID NO: 6847 - protein, 20 aa, Artificial Sequence
  Description of Artificial Sequence: targeting sequence/synthetic sequence
EAVKTHTNISESHPNATFSA

SEQ ID NO: 6848 - protein, 20 aa, Artificial Sequence
  Description of Artificial Sequence: targeting sequence/synthetic sequence
EVIVEKTKQTLASVSSGPKH

SEQ ID NO: 6849 - protein, 20 aa, Artificial Sequence
  Description of Artificial Sequence: targeting sequence/synthetic sequence
EAGNHTSGAGLVQINKSNGK

SEQ ID NO: 6850 - protein, 20 aa, Artificial Sequence
  Description of Artificial Sequence: targeting sequence/synthetic sequence
ANLDGETNLKIRQGLSHTAD

SEQ ID NO: 6851 - protein, 20 aa, Artificial Sequence
  Description of Artificial Sequence: targeting sequence/synthetic sequence
NMIQTKPTGTQQSTNTAVTL

SEQ ID NO: 6852 - protein, 20 aa, Artificial Sequence
  Description of Artificial Sequence: targeting sequence/synthetic sequence
APHKVVERTQNVTEKVTQVL

SEQ ID NO: 6853 - protein, 20 aa, Artificial Sequence
  Description of Artificial Sequence: targeting sequence/synthetic sequence
ITGDAQANVLRGAGGADVLA

SEQ ID NO: 6854 - protein, 20 aa, Artificial Sequence
  Description of Artificial Sequence: targeting sequence/synthetic sequence
NEHTSKITTGGDVINNGLWN

SEQ ID NO: 6855 - protein, 20 aa, Artificial Sequence
  Description of Artificial Sequence: targeting sequence/synthetic sequence
IVARQGMGDMAVSNSIGSNV

SEQ ID NO: 6856 - protein, 20 aa, Artificial Sequence
  Description of Artificial Sequence: targeting sequence/synthetic sequence
VQNALNGNGDPNNMDKAIKL

SEQ ID NO: 6857 - protein, 20 aa, Artificial Sequence
  Description of Artificial Sequence: targeting sequence/synthetic sequence
GAEPLKQRVEASISKANSFL

SEQ ID NO: 6858 - protein, 20 aa, Artificial Sequence
  Description of Artificial Sequence: targeting sequence/synthetic sequence
STDLIQANPKQGALAKKSSQ

SEQ ID NO: 6859 - protein, 20 aa, Artificial Sequence
  Description of Artificial Sequence: targeting sequence/synthetic sequence
QKHLAELNHQKQLESNKIPE

SEQ ID NO: 6860 - protein, 20 aa, Artificial Sequence
  Description of Artificial Sequence: targeting sequence/synthetic sequence
SSTNQLRSVGLNLEGNGVAT

SEQ ID NO: 6861 - protein, 20 aa, Artificial Sequence
  Description of Artificial Sequence: targeting sequence/synthetic sequence
PGPGNAQTSVSPSKVILPRG

SEQ ID NO: 6862 - protein, 20 aa, Artificial Sequence
  Description of Artificial Sequence: targeting sequence/synthetic sequence
VIARADNDVNSSLAHGHTAV

SEQ ID NO: 6863 - protein, 20 aa, Artificial Sequence
  Description of Artificial Sequence: targeting sequence/synthetic sequence
GYSVDNENPLSGKAGGVVKV

SEQ ID NO: 6864 - protein, 20 aa, Artificial Sequence
  Description of Artificial Sequence: targeting sequence/synthetic sequence
QAKQIQEQLKVPQNGKSYSL

SEQ ID NO: 6865 - protein, 20 aa, Artificial Sequence
  Description of Artificial Sequence: targeting sequence/synthetic sequence
AGNHTSGAGLVQINKSNGKE

SEQ ID NO: 6866 - protein, 20 aa, Artificial Sequence
  Description of Artificial Sequence: targeting sequence/synthetic sequence
NALNGNGDPNNMDKAVKLYR

SEQ ID NO: 6867 - protein, 20 aa, Artificial Sequence
  Description of Artificial Sequence: targeting sequence/synthetic sequence
ELAKHAVSEGTKAVSKYTSS

SEQ ID NO: 6868 - protein, 20 aa, Artificial Sequence
  Description of Artificial Sequence: targeting sequence/synthetic sequence
KQINDYVEKGTQGKIVDLVK

SEQ ID NO: 6869 - protein, 20 aa, Artificial Sequence
  Description of Artificial Sequence: targeting sequence/synthetic sequence
SSINVTLGAHNIKEQEPTQQ

SEQ ID NO: 6870 - protein, 20 aa, Artificial Sequence
  Description of Artificial Sequence: targeting sequence/synthetic sequence
INGSQHPSSSSSVNDVSSMS

SEQ ID NO: 6871 - protein, 20 aa, Artificial Sequence
  Description of Artificial Sequence: targeting sequence/synthetic sequence
KLSSTNQLRSVGLNLEGNGV

SEQ ID NO: 6872 - protein, 20 aa, Artificial Sequence
  Description of Artificial Sequence: targeting sequence/synthetic sequence
LNQAQEHFGKDKSKEFQLFS

SEQ ID NO: 6873 - protein, 20 aa, Artificial Sequence
  Description of Artificial Sequence: targeting sequence/synthetic sequence
SEENLAKLIQHANVQAHSSL

SEQ ID NO: 6874 - protein, 20 aa, Artificial Sequence
  Description of Artificial Sequence: targeting sequence/synthetic sequence
PVSELITKAVAASKERNGLS

SEQ ID NO: 6875 - protein, 20 aa, Artificial Sequence
  Description of Artificial Sequence: targeting sequence/synthetic sequence
MSSRGTTGNTQVQSPSNATT

SEQ ID NO: 6876 - protein, 20 aa, Artificial Sequence
  Description of Artificial Sequence: targeting sequence/synthetic sequence
EPLKQRVEASISKANSFLGE

SEQ ID NO: 6877 - protein, 20 aa, Artificial Sequence
  Description of Artificial Sequence: targeting sequence/synthetic sequence
LDALQRGKGLSHGVPEHPAL

SEQ ID NO: 6878 - protein, 20 aa, Artificial Sequence
  Description of Artificial Sequence: targeting sequence/synthetic sequence
AMSSRGTTGNTQVQSPSNAT

SEQ ID NO: 6879 - protein, 20 aa, Artificial Sequence
  Description of Artificial Sequence: targeting sequence/synthetic sequence
PGAKGANGAPGIAGAPGFPG

SEQ ID NO: 6880 - protein, 20 aa, Artificial Sequence
  Description of Artificial Sequence: targeting sequence/synthetic sequence
STQFDAAHPTNVQRLAEPSQ

SEQ ID NO: 6881 - protein, 20 aa, Artificial Sequence
  Description of Artificial Sequence: targeting sequence/synthetic sequence
NALQLSQPKPQKQLTAQSTP

SEQ ID NO: 6882 - protein, 20 aa, Artificial Sequence
  Description of Artificial Sequence: targeting sequence/synthetic sequence
TNVQRLAEPSQMLKHAVVNL

SEQ ID NO: 6883 - protein, 20 aa, Artificial Sequence
  Description of Artificial Sequence: targeting sequence/synthetic sequence
DTQEKLNHQLEGLTFQMKKN

SEQ ID NO: 6884 - protein, 20 aa, Artificial Sequence
  Description of Artificial Sequence: targeting sequence/synthetic sequence
QLSNNAKEAVEHLQKSELTQ

SEQ ID NO: 6885 - protein, 20 aa, Artificial Sequence
  Description of Artificial Sequence: targeting sequence/synthetic sequence
MPNHSETISHTVNVPLQTTL

SEQ ID NO: 6886 - protein, 20 aa, Artificial Sequence
  Description of Artificial Sequence: targeting sequence/synthetic sequence
GQRQGTQAESNLSSKFQFSS

SEQ ID NO: 6887 - protein, 20 aa, Artificial Sequence
  Description of Artificial Sequence: targeting sequence/synthetic sequence
EVNPAAHLTGANSSLTGSGG

SEQ ID NO: 6888 - protein, 20 aa, Artificial Sequence
  Description of Artificial Sequence: targeting sequence/synthetic sequence
TVISNALQLSQPKPQKQLTA

SEQ ID NO: 6889 - protein, 20 aa, Artificial Sequence
  Description of Artificial Sequence: targeting sequence/synthetic sequence
LNEVLVVPNIKESHHTTSNS

SEQ ID NO: 6890 - protein, 20 aa, Artificial Sequence
  Description of Artificial Sequence: targeting sequence/synthetic sequence
VQNALNGNGDPNNMDKAVKL

SEQ ID NO: 6891 - protein, 20 aa, Artificial Sequence
  Description of Artificial Sequence: targeting sequence/synthetic sequence
SSGHVHLSSENKFQNSAILT

SEQ ID NO: 6892 - protein, 20 aa, Artificial Sequence
  Description of Artificial Sequence: targeting sequence/synthetic sequence
VFSNDHSSGTKETRLELREM

SEQ ID NO: 6893 - protein, 20 aa, Artificial Sequence
  Description of Artificial Sequence: targeting sequence/synthetic sequence
NTQVQSPSNATTATGVFPGL

SEQ ID NO: 6894 - protein, 20 aa, Artificial Sequence
  Description of Artificial Sequence: targeting sequence/synthetic sequence
SSSSSSSESGSSSRSSSNNS

SEQ ID NO: 6895 - protein, 20 aa, Artificial Sequence
  Description of Artificial Sequence: targeting sequence/synthetic sequence
SKSQISSALNVNAKVLENSL

SEQ ID NO: 6896 - protein, 20 aa, Artificial Sequence
  Description of Artificial Sequence: targeting sequence/synthetic sequence
NVIGIGEPSRPSEKRRTEEA

SEQ ID NO: 6897 - protein, 20 aa, Artificial Sequence
  Description of Artificial Sequence: targeting sequence/synthetic sequence
IQEQLKVPQNGKSYSLKASS

SEQ ID NO: 6898 - protein, 20 aa, Artificial Sequence
  Description of Artificial Sequence: targeting sequence/synthetic sequence
PKPQSNLPDTKASGPAHSKE

SEQ ID NO: 6899 - protein, 20 aa, Artificial Sequence
  Description of Artificial Sequence: targeting sequence/synthetic sequence
QVLNVGPRVPIGPNPVITEQ

SEQ ID NO: 6900 - protein, 20 aa, Artificial Sequence
  Description of Artificial Sequence: targeting sequence/synthetic sequence
QAESNLSSKFQFSSNKEQNG

SEQ ID NO: 6901 - protein, 20 aa, Artificial Sequence
  Description of Artificial Sequence: targeting sequence/synthetic sequence
EENLAKLIQHANVQAHSSLI

SEQ ID NO: 6902 - protein, 20 aa, Artificial Sequence
  Description of Artificial Sequence: targeting sequence/synthetic sequence
GNAQTSVSPSKVILPRGGSV

SEQ ID NO: 6903 - protein, 20 aa, Artificial Sequence
  Description of Artificial Sequence: targeting sequence/synthetic sequence
AKKQINDYVEKGTQGKIVDL

SEQ ID NO: 6904 - protein, 20 aa, Artificial Sequence
  Description of Artificial Sequence: targeting sequence/synthetic sequence
NQAQEHFGKDKSKEFQLFSS

SEQ ID NO: 6905 - protein, 20 aa, Artificial Sequence
  Description of Artificial Sequence: targeting sequence/synthetic sequence
VSELIVQAASSSKERGGVSL

SEQ ID NO: 6906 - protein, 20 aa, Artificial Sequence
  Description of Artificial Sequence: targeting sequence/synthetic sequence
EVSTDLIQANPKQGALAKKS

SEQ ID NO: 6907 - protein, 20 aa, Artificial Sequence
  Description of Artificial Sequence: targeting sequence/synthetic sequence
GAGMAGGITGSMSLASGRSL

SEQ ID NO: 6908 - protein, 20 aa, Artificial Sequence
  Description of Artificial Sequence: targeting sequence/synthetic sequence
ALALSLPKPQSNLPDTKASG

SEQ ID NO: 6909 - protein, 20 aa, Artificial Sequence
  Description of Artificial Sequence: targeting sequence/synthetic sequence
LLQLGQETDKLKTRNRESIS

SEQ ID NO: 6910 - protein, 20 aa, Artificial Sequence
  Description of Artificial Sequence: targeting sequence/synthetic sequence
LIVARQGMGDMAVSNSIGSN

SEQ ID NO: 6911 - protein, 20 aa, Artificial Sequence
  Description of Artificial Sequence: targeting sequence/synthetic sequence
SSSESGSSSRSSSNNSSISR

SEQ ID NO: 6912 - protein, 20 aa, Artificial Sequence
  Description of Artificial Sequence: targeting sequence/synthetic sequence
TLRPGEVTALVGPNGSGKST

SEQ ID NO: 6913 - protein, 20 aa, Artificial Sequence
  Description of Artificial Sequence: targeting sequence/synthetic sequence
KHLAELNHQKQLESNKIPEL

SEQ ID NO: 6914 - protein, 20 aa, Artificial Sequence
  Description of Artificial Sequence: targeting sequence/synthetic sequence
VQNALNGNGDSNNMDRAVKL

SEQ ID NO: 6915 - protein, 20 aa, Artificial Sequence
  Description of Artificial Sequence: targeting sequence/synthetic sequence
LTGDTTVTRGDAFLNKNSIL

SEQ ID NO: 6916 - protein, 20 aa, Artificial Sequence
  Description of Artificial Sequence: targeting sequence/synthetic sequence
AFTQETIDRLAGKPTHVNVS

SEQ ID NO: 6917 - protein, 20 aa, Artificial Sequence
  Description of Artificial Sequence: targeting sequence/synthetic sequence
TQVQSPSNATTATGVFPGLT

SEQ ID NO: 6918 - protein, 20 aa, Artificial Sequence
  Description of Artificial Sequence: targeting sequence/synthetic sequence
VSTDLIQANPKQGALAKKSS

SEQ ID NO: 6919 - protein, 20 aa, Artificial Sequence
  Description of Artificial Sequence: targeting sequence/synthetic sequence
VATISANGDKEIGNIISDAM

SEQ ID NO: 6920 - protein, 20 aa, Artificial Sequence
  Description of Artificial Sequence: targeting sequence/synthetic sequence
NVTLGAHNIKEQEPTQQFIP

SEQ ID NO: 6921 - protein, 20 aa, Artificial Sequence
  Description of Artificial Sequence: targeting sequence/synthetic sequence
LAVMHSQSTNQLDVGNNPRV

SEQ ID NO: 6922 - protein, 20 aa, Artificial Sequence
  Description of Artificial Sequence: targeting sequence/synthetic sequence
VKRSSQSTLERSEQQIRAAS

SEQ ID NO: 6923 - protein, 20 aa, Artificial Sequence
  Description of Artificial Sequence: targeting sequence/synthetic sequence
RADNDVNSSLAHGHTAVDLT

SEQ ID NO: 6924 - protein, 20 aa, Artificial Sequence
  Description of Artificial Sequence: targeting sequence/synthetic sequence
RPPGRALDTAAGSPVQTAHG

SEQ ID NO: 6925 - protein, 20 aa, Artificial Sequence
  Description of Artificial Sequence: targeting sequence/synthetic sequence
VNGQIESLISPDGSRKNPAR

SEQ ID NO: 6926 - protein, 20 aa, Artificial Sequence
  Description of Artificial Sequence: targeting sequence/synthetic sequence
ASERGLHMQKLGSGSVQAAL

SEQ ID NO: 6927 - protein, 20 aa, Artificial Sequence
  Description of Artificial Sequence: targeting sequence/synthetic sequence
NGQIESLISPDGSRKNPARN

SEQ ID NO: 6928 - protein, 20 aa, Artificial Sequence
  Description of Artificial Sequence: targeting sequence/synthetic sequence
VLGAPDLGQRPQGTRPGLAK

SEQ ID NO: 6929 - protein, 20 aa, Artificial Sequence
  Description of Artificial Sequence: targeting sequence/synthetic sequence
NIDVRNSTQHLGPVHREKAE

SEQ ID NO: 6930 - protein, 20 aa, Artificial Sequence
  Description of Artificial Sequence: targeting sequence/synthetic sequence
HRGAPVNISSSDLTGRQDTS

SEQ ID NO: 6931 - protein, 20 aa, Artificial Sequence
  Description of Artificial Sequence: targeting sequence/synthetic sequence
VLNVGPRVPIGPNPVITEQL

SEQ ID NO: 6932 - protein, 20 aa, Artificial Sequence
  Description of Artificial Sequence: targeting sequence/synthetic sequence
QGISSSSTSTMPNSSQSSHS

SEQ ID NO: 6933 - protein, 20 aa, Artificial Sequence
  Description of Artificial Sequence: targeting sequence/synthetic sequence
VEKTKQTLASVSSGPKHTQS

SEQ ID NO: 6934 - protein, 20 aa, Artificial Sequence
  Description of Artificial Sequence: targeting sequence/synthetic sequence
NDVNSSLAHGHTAVDLTLSK

SEQ ID NO: 6935 - protein, 20 aa, Artificial Sequence
  Description of Artificial Sequence: targeting sequence/synthetic sequence
SVLTALQDSSKRKQLVSDGL

SEQ ID NO: 6936 - protein, 20 aa, Artificial Sequence
  Description of Artificial Sequence: targeting sequence/synthetic sequence
VDNENPLSGKAGGVVKVTYP

SEQ ID NO: 6937 - protein, 20 aa, Artificial Sequence
  Description of Artificial Sequence: targeting sequence/synthetic sequence
TVAANVIGIGEPSRPSEKRR

SEQ ID NO: 6938 - protein, 20 aa, Artificial Sequence
  Description of Artificial Sequence: targeting sequence/synthetic sequence
GLAVMHSQSTNQLDVGNNPR

SEQ ID NO: 6939 - protein, 20 aa, Artificial Sequence
  Description of Artificial Sequence: targeting sequence/synthetic sequence
KPGSSGPGSTGSWNSGSSGT

SEQ ID NO: 6940 - protein, 20 aa, Artificial Sequence
  Description of Artificial Sequence: targeting sequence/synthetic sequence
TGNTQVQSPSNATTATGVFP

SEQ ID NO: 6941 - protein, 20 aa, Artificial Sequence
  Description of Artificial Sequence: targeting sequence/synthetic sequence
TLGAHNIKEQEPTQQFIPVK

SEQ ID NO: 6942 - protein, 20 aa, Artificial Sequence
  Description of Artificial Sequence: targeting sequence/synthetic sequence
RVADTIMSGPSNSQQVPALT

SEQ ID NO: 6943 - protein, 20 aa, Artificial Sequence
  Description of Artificial Sequence: targeting sequence/synthetic sequence
ANGDKEIGNIISDAMKKVGR

SEQ ID NO: 6944 - protein, 20 aa, Artificial Sequence
  Description of Artificial Sequence: targeting sequence/synthetic sequence
IMEFPNKFNTLVGEKGAQMS

SEQ ID NO: 6945 - protein, 20 aa, Artificial Sequence
  Description of Artificial Sequence: targeting sequence/synthetic sequence
DGETNLKIRQGLSHTADMQT

SEQ ID NO: 6946 - protein, 20 aa, Artificial Sequence
  Description of Artificial Sequence: targeting sequence/synthetic sequence
LPGELAKHAVSEGTKAVSKY

SEQ ID NO: 6947 - protein, 20 aa, Artificial Sequence
  Description of Artificial Sequence: targeting sequence/synthetic sequence
KAVPDRNATTLGLPNNSNNS

SEQ ID NO: 6948 - protein, 20 aa, Artificial Sequence
  Description of Artificial Sequence: targeting sequence/synthetic sequence
NLQDIQGKMEAAIKKIPTIS

SEQ ID NO: 6949 - protein, 20 aa, Artificial Sequence
  Description of Artificial Sequence: targeting sequence/synthetic sequence
QPGAKGANGAPGIAGAPGFP

SEQ ID NO: 6950 - protein, 20 aa, Artificial Sequence
  Description of Artificial Sequence: targeting sequence/synthetic sequence
PAAHLTGANSSLTGSGGPLL

SEQ ID NO: 6951 - protein, 20 aa, Artificial Sequence
  Description of Artificial Sequence: targeting sequence/synthetic sequence
TVQSLTQGDGVAKLSINTHP

SEQ ID NO: 6952 - protein, 20 aa, Artificial Sequence
  Description of Artificial Sequence: targeting sequence/synthetic sequence
QLQPSLQTGSEERKSLYNTV

SEQ ID NO: 6953 - protein, 20 aa, Artificial Sequence
  Description of Artificial Sequence: targeting sequence/synthetic sequence
KKIIGQLQPSLQTGSEELKS

SEQ ID NO: 6954 - protein, 20 aa, Artificial Sequence
  Description of Artificial Sequence: targeting sequence/synthetic sequence
ISANGDKEIGNIISDAMKKV

SEQ ID NO: 6955 - protein, 20 aa, Artificial Sequence
  Description of Artificial Sequence: targeting sequence/synthetic sequence
STMPNSSQSSHSSSGTLSSL

SEQ ID NO: 6956 - protein, 20 aa, Artificial Sequence
  Description of Artificial Sequence: targeting sequence/synthetic sequence
FPNKFNTLVGEKGAQMSGGQ

SEQ ID NO: 6957 - protein, 20 aa, Artificial Sequence
  Description of Artificial Sequence: targeting sequence/synthetic sequence
EVNVIPPHTPVRTVMNTIQQ

SEQ ID NO: 6958 - protein, 20 aa, Artificial Sequence
  Description of Artificial Sequence: targeting sequence/synthetic sequence
ALQLSQPKPQKQLTAQSTPS

SEQ ID NO: 6959 - protein, 20 aa, Artificial Sequence
  Description of Artificial Sequence: targeting sequence/synthetic sequence
YSKSQISSALNVNAKVLENS

SEQ ID NO: 6960 - protein, 20 aa, Artificial Sequence
  Description of Artificial Sequence: targeting sequence/synthetic sequence
LTIGEGQQHHLGGAKQAGDV

SEQ ID NO: 6961 - protein, 20 aa, Artificial Sequence
  Description of Artificial Sequence: targeting sequence/synthetic sequence
MLTGDTTVTRGDAFLNKNSI

SEQ ID NO: 6962 - protein, 20 aa, Artificial Sequence
  Description of Artificial Sequence: targeting sequence/synthetic sequence
VQEERSAGATANLPLRSGRN

SEQ ID NO: 6963 - protein, 20 aa, Artificial Sequence
  Description of Artificial Sequence: targeting sequence/synthetic sequence
ELVLEGQVAQSSVILGGAAH

SEQ ID NO: 6964 - protein, 20 aa, Artificial Sequence
  Description of Artificial Sequence: targeting sequence/synthetic sequence
FAPANTHNNNIEGQAIVYQN

SEQ ID NO: 6965 - protein, 20 aa, Artificial Sequence
  Description of Artificial Sequence: targeting sequence/synthetic sequence
AEPLKQRVEASISKANSFLG

SEQ ID NO: 6966 - protein, 20 aa, Artificial Sequence
  Description of Artificial Sequence: targeting sequence/synthetic sequence
SSSTSTMPNSSQSSHSSSGT

SEQ ID NO: 6967 - protein, 20 aa, Artificial Sequence
  Description of Artificial Sequence: targeting sequence/synthetic sequence
VETANLDGETNLKIRQGLSH

SEQ ID NO: 6968 - protein, 20 aa, Artificial Sequence
  Description of Artificial Sequence: targeting sequence/synthetic sequence
NHSETISHTVNVPLQTTLGT

SEQ ID NO: 6969 - protein, 20 aa, Artificial Sequence
  Description of Artificial Sequence: targeting sequence/synthetic sequence
AREIKQNARTLMNLHNNEAG

SEQ ID NO: 6970 - protein, 20 aa, Artificial Sequence
  Description of Artificial Sequence: targeting sequence/synthetic sequence
RLTIGEGQQHHLGGAKQAGD

SEQ ID NO: 6971 - protein, 20 aa, Artificial Sequence
  Description of Artificial Sequence: targeting sequence/synthetic sequence
TGDTTVTRGDAFLNKNSILS

SEQ ID NO: 6972 - protein, 20 aa, Artificial Sequence
  Description of Artificial Sequence: targeting sequence/synthetic sequence
LQNRFESSEEQARAVQMSTK

SEQ ID NO: 6973 - protein, 20 aa, Artificial Sequence
  Description of Artificial Sequence: targeting sequence/synthetic sequence
ALREIRRYQKSTELLIRKLP

SEQ ID NO: 6974 - protein, 20 aa, Artificial Sequence
  Description of Artificial Sequence: targeting sequence/synthetic sequence
LEERTKNGVIRGQPSPLGAA

SEQ ID NO: 6975 - protein, 20 aa, Artificial Sequence
  Description of Artificial Sequence: targeting sequence/synthetic sequence
MVYSKSQISSALNVNAKVLE

SEQ ID NO: 6976 - protein, 20 aa, Artificial Sequence
  Description of Artificial Sequence: targeting sequence/synthetic sequence
SPLSGKVRSEGTNSTLTLSP

SEQ ID NO: 6977 - protein, 20 aa, Artificial Sequence
  Description of Artificial Sequence: targeting sequence/synthetic sequence
EDIAARLNIPVSQVNPRDAK

SEQ ID NO: 6978 - protein, 20 aa, Artificial Sequence
  Description of Artificial Sequence: targeting sequence/synthetic sequence
RDSYSQMQSQAGGNNTGSTP

SEQ ID NO: 6979 - protein, 20 aa, Artificial Sequence
  Description of Artificial Sequence: targeting sequence/synthetic sequence
DTNLQDIQGKMEAAIKKIPT

SEQ ID NO: 6980 - protein, 20 aa, Artificial Sequence
  Description of Artificial Sequence: targeting sequence/synthetic sequence
TDVGEKGSQLAAGQKQRLAI

SEQ ID NO: 6981 - protein, 20 aa, Artificial Sequence
  Description of Artificial Sequence: targeting sequence/synthetic sequence
APANTQNNNIEGQAIVYQSK

SEQ ID NO: 6982 - protein, 20 aa, Artificial Sequence
  Description of Artificial Sequence: targeting sequence/synthetic sequence
LNMHMNVQNGKWDSDPSGTK

SEQ ID NO: 6983 - protein, 20 aa, Artificial Sequence
  Description of Artificial Sequence: targeting sequence/synthetic sequence
DASERGLHMQKLGSGSVQAA

SEQ ID NO: 6984 - protein, 20 aa, Artificial Sequence
  Description of Artificial Sequence: targeting sequence/synthetic sequence
NGTVTQGDQRVSMPYASKGL

SEQ ID NO: 6985 - protein, 20 aa, Artificial Sequence
  Description of Artificial Sequence: targeting sequence/synthetic sequence
IEIIAPHKVVERTQNVTEKV

SEQ ID NO: 6986 - protein, 20 aa, Artificial Sequence
  Description of Artificial Sequence: targeting sequence/synthetic sequence
NTVVGERGTTLSGGQKQRLA

SEQ ID NO: 6987 - protein, 20 aa, Artificial Sequence
  Description of Artificial Sequence: targeting sequence/synthetic sequence
GSTTRVNSTANAETQATSAF

SEQ ID NO: 6988 - protein, 20 aa, Artificial Sequence
  Description of Artificial Sequence: targeting sequence/synthetic sequence
DILAQVATNTETSKNVGNAI

SEQ ID NO: 6989 - protein, 20 aa, Artificial Sequence
  Description of Artificial Sequence: targeting sequence/synthetic sequence
ALNRRAHAVGAQDVVQHGTE

SEQ ID NO: 6990 - protein, 20 aa, Artificial Sequence
  Description of Artificial Sequence: targeting sequence/synthetic sequence
QPALQTGTKELISLHNTVAT

SEQ ID NO: 6991 - protein, 20 aa, Artificial Sequence
  Description of Artificial Sequence: targeting sequence/synthetic sequence
DRRAPTRNQPQAPGVEASGA

SEQ ID NO: 6992 - protein, 20 aa, Artificial Sequence
  Description of Artificial Sequence: targeting sequence/synthetic sequence
AVSKAVPDRNATTLGLPNNS

SEQ ID NO: 6993 - protein, 20 aa, Artificial Sequence
  Description of Artificial Sequence: targeting sequence/synthetic sequence
HVRDSYSQMQSQAGGNNTGS

SEQ ID NO: 6994 - protein, 20 aa, Artificial Sequence
  Description of Artificial Sequence: targeting sequence/synthetic sequence
VEVHNAKTKPREEQFNSTFR

SEQ ID NO: 6995 - protein, 20 aa, Artificial Sequence
  Description of Artificial Sequence: targeting sequence/synthetic sequence
LQPALQTGTKELISLHNTVA

SEQ ID NO: 6996 - protein, 20 aa, Artificial Sequence
  Description of Artificial Sequence: targeting sequence/synthetic sequence
GLQGLPGPKGQQGVTGLVGI

SEQ ID NO: 6997 - protein, 20 aa, Artificial Sequence
  Description of Artificial Sequence: targeting sequence/synthetic sequence
RAHAVGAQDVVQHGTEQNNP

SEQ ID NO: 6998 - protein, 20 aa, Artificial Sequence
  Description of Artificial Sequence: targeting sequence/synthetic sequence
AAGYSVDNENPLSGKAGGVV

SEQ ID NO: 6999 - protein, 20 aa, Artificial Sequence
  Description of Artificial Sequence: targeting sequence/synthetic sequence
PRGSSSRQSSSSAMSSSSAS

SEQ ID NO: 7000 - protein, 20 aa, Artificial Sequence
  Description of Artificial Sequence: targeting sequence/synthetic sequence
QDITDASERGLHMQKLGSGS

SEQ ID NO: 7001 - protein, 20 aa, Artificial Sequence
  Description of Artificial Sequence: targeting sequence/synthetic sequence
NVQEERSAGATANLPLRSGR

SEQ ID NO: 7002 - protein, 20 aa, Artificial Sequence
  Description of Artificial Sequence: targeting sequence/synthetic sequence
DLNMTRSHSGGELESLARGR

SEQ ID NO: 7003 - protein, 20 aa, Artificial Sequence
  Description of Artificial Sequence: targeting sequence/synthetic sequence
DKAGTRENQPAVVHLQGQGS

SEQ ID NO: 7004 - protein, 20 aa, Artificial Sequence
  Description of Artificial Sequence: targeting sequence/synthetic sequence
FNQSYSKFDTKSHNDDALLK

SEQ ID NO: 7005 - protein, 20 aa, Artificial Sequence
  Description of Artificial Sequence: targeting sequence/synthetic sequence
GRVADTIARGPSNSEQIPAL

SEQ ID NO: 7006 - protein, 20 aa, Artificial Sequence
  Description of Artificial Sequence: targeting sequence/synthetic sequence
NGLPGNPGVQGQKGEPGVGL

SEQ ID NO: 7007 - protein, 20 aa, Artificial Sequence
  Description of Artificial Sequence: targeting sequence/synthetic sequence
QGPSGAADKAGTRENQPAVV

SEQ ID NO: 7008 - protein, 20 aa, Artificial Sequence
  Description of Artificial Sequence: targeting sequence/synthetic sequence
SYSKFDTKSHNDDALLKNYG

SEQ ID NO: 7009 - protein, 20 aa, Artificial Sequence
  Description of Artificial Sequence: targeting sequence/synthetic sequence
GLTFLAKSTELNQPDKKGYT

SEQ ID NO: 7010 - protein, 20 aa, Artificial Sequence
  Description of Artificial Sequence: targeting sequence/synthetic sequence
VQLKNEHTSKITTGGDVINN

SEQ ID NO: 7011 - protein, 20 aa, Artificial Sequence
  Description of Artificial Sequence: targeting sequence/synthetic sequence
QNGEAVKTHTNISESHPNAT

SEQ ID NO: 7012 - protein, 20 aa, Artificial Sequence
  Description of Artificial Sequence: targeting sequence/synthetic sequence
PRDAGSQRPRKKEDNVLVES

SEQ ID NO: 7013 - protein, 20 aa, Artificial Sequence
  Description of Artificial Sequence: targeting sequence/synthetic sequence
PADSEHNKLKASQARDLLSK

SEQ ID NO: 7014 - protein, 20 aa, Artificial Sequence
  Description of Artificial Sequence: targeting sequence/synthetic sequence
QRQQIKAAYLQETGKPLDET

SEQ ID NO: 7015 - protein, 20 aa, Artificial Sequence
  Description of Artificial Sequence: targeting sequence/synthetic sequence
KAINKQAYEEISKEHLAVYK

SEQ ID NO: 7016 - protein, 20 aa, Artificial Sequence
  Description of Artificial Sequence: targeting sequence/synthetic sequence
QGTQDITDASERGLHMQKLG

SEQ ID NO: 7017 - protein, 20 aa, Artificial Sequence
  Description of Artificial Sequence: targeting sequence/synthetic sequence
LAKSTELNQPDKKGYTPIHV

SEQ ID NO: 7018 - protein, 20 aa, Artificial Sequence
  Description of Artificial Sequence: targeting sequence/synthetic sequence
FLGHNGAGKTTTMSILTGLF

SEQ ID NO: 7019 - protein, 20 aa, Artificial Sequence
  Description of Artificial Sequence: targeting sequence/synthetic sequence
GSTALSRSAVQESTGGKTQI

SEQ ID NO: 7020 - protein, 20 aa, Artificial Sequence
  Description of Artificial Sequence: targeting sequence/synthetic sequence
AQANVLRGAGGADVLAGGEG

SEQ ID NO: 7021 - protein, 20 aa, Artificial Sequence
  Description of Artificial Sequence: targeting sequence/synthetic sequence
PDLKNVKSKIGSTENLKHQP

SEQ ID NO: 7022 - protein, 20 aa, Artificial Sequence
  Description of Artificial Sequence: targeting sequence/synthetic sequence
KNPTNHFPSSEGDSSKPSLM

SEQ ID NO: 7023 - protein, 20 aa, Artificial Sequence
  Description of Artificial Sequence: targeting sequence/synthetic sequence
ELDLNMTRSHSGGELESLAR

SEQ ID NO: 7024 - protein, 20 aa, Artificial Sequence
  Description of Artificial Sequence: targeting sequence/synthetic sequence
QNALRPPGRALDTAAGSPVQ

SEQ ID NO: 7025 - protein, 20 aa, Artificial Sequence
  Description of Artificial Sequence: targeting sequence/synthetic sequence
GVQGQKGEPGVGLPGLKGLP

SEQ ID NO: 7026 - protein, 20 aa, Artificial Sequence
  Description of Artificial Sequence: targeting sequence/synthetic sequence
TVLGAPDLGQRPQGTRPGLA

SEQ ID NO: 7027 - protein, 20 aa, Artificial Sequence
  Description of Artificial Sequence: targeting sequence/synthetic sequence
KGLQGLPGPKGQQGVTGLVG

SEQ ID NO: 7028 - protein, 20 aa, Artificial Sequence
  Description of Artificial Sequence: targeting sequence/synthetic sequence
LDRRAPTRNQPQAPGVEASG

SEQ ID NO: 7029 - protein, 20 aa, Artificial Sequence
  Description of Artificial Sequence: targeting sequence/synthetic sequence
NLKETWTANVGKGQPSVLQV

SEQ ID NO: 7030 - protein, 20 aa, Artificial Sequence
  Description of Artificial Sequence: targeting sequence/synthetic sequence
GPGAGSLQPLALEGSLQKRG

SEQ ID NO: 7031 - protein, 20 aa, Artificial Sequence
  Description of Artificial Sequence: targeting sequence/synthetic sequence
SSLIRNLEQLGGTVTNPGGS

SEQ ID NO: 7032 - protein, 20 aa, Artificial Sequence
  Description of Artificial Sequence: targeting sequence/synthetic sequence
GSLYDNQANDAGKKLAKNLL

SEQ ID NO: 7033 - protein, 20 aa, Artificial Sequence
  Description of Artificial Sequence: targeting sequence/synthetic sequence
LKSVNGQIESLISPDGSRKN

SEQ ID NO: 7034 - protein, 20 aa, Artificial Sequence
  Description of Artificial Sequence: targeting sequence/synthetic sequence
AQRQQIKAAYLQETGKPLDE

SEQ ID NO: 7035 - protein, 20 aa, Artificial Sequence
  Description of Artificial Sequence: targeting sequence/synthetic sequence
KRSSQSTLERSEQQIRAASS

SEQ ID NO: 7036 - protein, 20 aa, Artificial Sequence
  Description of Artificial Sequence: targeting sequence/synthetic sequence
PVNISSSDLTGRQDTSRMST

SEQ ID NO: 7037 - protein, 20 aa, Artificial Sequence
  Description of Artificial Sequence: targeting sequence/synthetic sequence
FLAKSTELNQPDKKGYTPIH

SEQ ID NO: 7038 - protein, 20 aa, Artificial Sequence
  Description of Artificial Sequence: targeting sequence/synthetic sequence
GAADKAGTRENQPAVVHLQG

SEQ ID NO: 7039 - protein, 20 aa, Artificial Sequence
  Description of Artificial Sequence: targeting sequence/synthetic sequence
TQAESNLSSKFQFSSNKEQN

SEQ ID NO: 7040 - protein, 20 aa, Artificial Sequence
  Description of Artificial Sequence: targeting sequence/synthetic sequence
PVPMPDLKNVKSKIGSTENL

SEQ ID NO: 7041 - protein, 20 aa, Artificial Sequence
  Description of Artificial Sequence: targeting sequence/synthetic sequence
TLYVTGKQNELSDTAGREIN

SEQ ID NO: 7042 - protein, 20 aa, Artificial Sequence
  Description of Artificial Sequence: targeting sequence/synthetic sequence
DIAARLNIPVSQVNPRDAKA

SEQ ID NO: 7043 - protein, 20 aa, Artificial Sequence
  Description of Artificial Sequence: targeting sequence/synthetic sequence
VDAREIKQNARTLMNLHNNE

SEQ ID NO: 7044 - protein, 20 aa, Artificial Sequence
  Description of Artificial Sequence: targeting sequence/synthetic sequence
ATGSRIGVLTQNATNMGLSV

SEQ ID NO: 7045 - protein, 20 aa, Artificial Sequence
  Description of Artificial Sequence: targeting sequence/synthetic sequence
LVGEKGAQMSGGQKQRIAIA

SEQ ID NO: 7046 - protein, 20 aa, Artificial Sequence
  Description of Artificial Sequence: targeting sequence/synthetic sequence
KFSYSSGHVHLSSENKFQNS

SEQ ID NO: 7047 - protein, 20 aa, Artificial Sequence
  Description of Artificial Sequence: targeting sequence/synthetic sequence
SATGESQMLTRGQLKEYIGQ

SEQ ID NO: 7048 - protein, 20 aa, Artificial Sequence
  Description of Artificial Sequence: targeting sequence/synthetic sequence
TRVNSTANAETQATSAFQTQ

SEQ ID NO: 7049 - protein, 20 aa, Artificial Sequence
  Description of Artificial Sequence: targeting sequence/synthetic sequence
NISSSDLTGRQDTSRMSTSQ

SEQ ID NO: 7050 - protein, 20 aa, Artificial Sequence
  Description of Artificial Sequence: targeting sequence/synthetic sequence
QILGQLQPSLKTGSEEIRSL

SEQ ID NO: 7051 - protein, 20 aa, Artificial Sequence
  Description of Artificial Sequence: targeting sequence/synthetic sequence
QGATGSRIGVLTQNATNMGL

SEQ ID NO: 7052 - protein, 20 aa, Artificial Sequence
  Description of Artificial Sequence: targeting sequence/synthetic sequence
GGGPGAGSLQPLALEGSLQK

SEQ ID NO: 7053 - protein, 20 aa, Artificial Sequence
  Description of Artificial Sequence: targeting sequence/synthetic sequence
SSSSTSTMPNSSQSSHSSSG

SEQ ID NO: 7054 - protein, 20 aa, Artificial Sequence
  Description of Artificial Sequence: targeting sequence/synthetic sequence
GNLKETWTANVGKGQPSVLQ

SEQ ID NO: 7055 - protein, 20 aa, Artificial Sequence
  Description of Artificial Sequence: targeting sequence/synthetic sequence
RPVQSVASSRRHKRFAGVVL

SEQ ID NO: 7056 - protein, 20 aa, Artificial Sequence
  Description of Artificial Sequence: targeting sequence/synthetic sequence
VNGTVTQGDQRVSMPYASKG

SEQ ID NO: 7057 - protein, 20 aa, Artificial Sequence
  Description of Artificial Sequence: targeting sequence/synthetic sequence
LSDTAGREINLVDAHLKSEQ

SEQ ID NO: 7058 - protein, 20 aa, Artificial Sequence
  Description of Artificial Sequence: targeting sequence/synthetic sequence
MDLEERTKNGVIRGQPSPLG

SEQ ID NO: 7059 - protein, 20 aa, Artificial Sequence
  Description of Artificial Sequence: targeting sequence/synthetic sequence
AEKVYNTRHQEVLREIQDAV

SEQ ID NO: 7060 - protein, 20 aa, Artificial Sequence
  Description of Artificial Sequence: targeting sequence/synthetic sequence
GRPGEAGLPGAKGLTGSPGS

SEQ ID NO: 7061 - protein, 20 aa, Artificial Sequence
  Description of Artificial Sequence: targeting sequence/synthetic sequence
ADSEHNKLKASQARDLLSKM

SEQ ID NO: 7062 - protein, 20 aa, Artificial Sequence
  Description of Artificial Sequence: targeting sequence/synthetic sequence
TVALREIRRYQKSTELLIRK

SEQ ID NO: 7063 - protein, 20 aa, Artificial Sequence
  Description of Artificial Sequence: targeting sequence/synthetic sequence
DDHLKDLSLHKNQTVVDVAV

SEQ ID NO: 7064 - protein, 20 aa, Artificial Sequence
  Description of Artificial Sequence: targeting sequence/synthetic sequence
EERTKNGVIRGQPSPLGAAV

SEQ ID NO: 7065 - protein, 20 aa, Artificial Sequence
  Description of Artificial Sequence: targeting sequence/synthetic sequence
VRDSYSQMQSQAGGNNTGST

SEQ ID NO: 7066 - protein, 20 aa, Artificial Sequence
  Description of Artificial Sequence: targeting sequence/synthetic sequence
PGFNGLPGNPGVQGQKGEPG

SEQ ID NO: 7067 - protein, 20 aa, Artificial Sequence
  Description of Artificial Sequence: targeting sequence/synthetic sequence
SRSSRAGLQFPVGRIHRLLR

SEQ ID NO: 7068 - protein, 20 aa, Artificial Sequence
  Description of Artificial Sequence: targeting sequence/synthetic sequence
QTYSKFDTNSHNHDALLKNY

SEQ ID NO: 7069 - protein, 20 aa, Artificial Sequence
  Description of Artificial Sequence: targeting sequence/synthetic sequence
PKGDKGAQGLPGITGQSGLP

SEQ ID NO: 7070 - protein, 20 aa, Artificial Sequence
  Description of Artificial Sequence: targeting sequence/synthetic sequence
ISSSSTSTMPNSSQSSHSSS

SEQ ID NO: 7071 - protein, 20 aa, Artificial Sequence
  Description of Artificial Sequence: targeting sequence/synthetic sequence
SDDDHLKDLSLHKNQTVVDV

SEQ ID NO: 7072 - protein, 20 aa, Artificial Sequence
  Description of Artificial Sequence: targeting sequence/synthetic sequence
LVLEGQVAQSSVILGGAAHR

SEQ ID NO: 7073 - protein, 20 aa, Artificial Sequence
  Description of Artificial Sequence: targeting sequence/synthetic sequence
TEVAQNALALSLPKPQSNLP

SEQ ID NO: 7074 - protein, 20 aa, Artificial Sequence
  Description of Artificial Sequence: targeting sequence/synthetic sequence
APLAPRDAGSQRPRKKEDNV

SEQ ID NO: 7075 - protein, 20 aa, Artificial Sequence
  Description of Artificial Sequence: targeting sequence/synthetic sequence
RGFAGSTALSRSAVQESTGG

SEQ ID NO: 7076 - protein, 20 aa, Artificial Sequence
  Description of Artificial Sequence: targeting sequence/synthetic sequence
YLQNRFESSEEQARAVQMST

SEQ ID NO: 7077 - protein, 20 aa, Artificial Sequence
  Description of Artificial Sequence: targeting sequence/synthetic sequence
IDSPLSGKVRSEGTNSTLTL

SEQ ID NO: 7078 - protein, 20 aa, Artificial Sequence
  Description of Artificial Sequence: targeting sequence/synthetic sequence
IAAEKVYNTRHQEVLREIQD

SEQ ID NO: 7079 - protein, 20 aa, Artificial Sequence
  Description of Artificial Sequence: targeting sequence/synthetic sequence
WNSGSSGPGSTGNRNPGSSG

SEQ ID NO: 7080 - protein, 20 aa, Artificial Sequence
  Description of Artificial Sequence: targeting sequence/synthetic sequence
PQEEFDGNQFQKAPAISVLH

SEQ ID NO: 7081 - protein, 20 aa, Artificial Sequence
  Description of Artificial Sequence: targeting sequence/synthetic sequence
EFDDKQFQKAQAISVLHEMI

SEQ ID NO: 7082 - protein, 20 aa, Artificial Sequence
  Description of Artificial Sequence: targeting sequence/synthetic sequence
PHRYRPGTVALREIRRYQKS

SEQ ID NO: 7083 - protein, 20 aa, Artificial Sequence
  Description of Artificial Sequence: targeting sequence/synthetic sequence
FNRAVKSLQNASAIESILKN

SEQ ID NO: 7084 - protein, 20 aa, Artificial Sequence
  Description of Artificial Sequence: targeting sequence/synthetic sequence
NVQRLAEPSQMLKHAVVNLI

SEQ ID NO: 7085 - protein, 20 aa, Artificial Sequence
  Description of Artificial Sequence: targeting sequence/synthetic sequence
AETMGLNTADTARLNANIRY

SEQ ID NO: 7086 - protein, 20 aa, Artificial Sequence
  Description of Artificial Sequence: targeting sequence/synthetic sequence
SLYDNQANDAGKKLAKNLLQ

SEQ ID NO: 7087 - protein, 20 aa, Artificial Sequence
  Description of Artificial Sequence: targeting sequence/synthetic sequence
PSGAADKAGTRENQPAVVHL

SEQ ID NO: 7088 - protein, 20 aa, Artificial Sequence
  Description of Artificial Sequence: targeting sequence/synthetic sequence
ATGESQMLTRGQLKEYIGQQ

SEQ ID NO: 7089 - protein, 20 aa, Artificial Sequence
  Description of Artificial Sequence: targeting sequence/synthetic sequence
IMNSFVNDIFERIAGEASRL

SEQ ID NO: 7090 - protein, 20 aa, Artificial Sequence
  Description of Artificial Sequence: targeting sequence/synthetic sequence
QNKAINKQAYEEISKEHLAV

SEQ ID NO: 7091 - protein, 20 aa, Artificial Sequence
  Description of Artificial Sequence: targeting sequence/synthetic sequence
TLPPGKIVALVGQSGGGKTT

SEQ ID NO: 7092 - protein, 20 aa, Artificial Sequence
  Description of Artificial Sequence: targeting sequence/synthetic sequence
VAEAAVSQSSGLAAKFVIHC

SEQ ID NO: 7093 - protein, 20 aa, Artificial Sequence
  Description of Artificial Sequence: targeting sequence/synthetic sequence
KAMGIMNSFVNDIFERIASE

SEQ ID NO: 7094 - protein, 20 aa, Artificial Sequence
  Description of Artificial Sequence: targeting sequence/synthetic sequence
DHNYLCKRGVTDRGWGNGCG

SEQ ID NO: 7095 - protein, 20 aa, Artificial Sequence
  Description of Artificial Sequence: targeting sequence/synthetic sequence
DISHTQSVSSKQKVTGLDFI

SEQ ID NO: 7096 - protein, 20 aa, Artificial Sequence
  Description of Artificial Sequence: targeting sequence/synthetic sequence
NPGVQGQKGEPGVGLPGLKG

SEQ ID NO: 7097 - protein, 20 aa, Artificial Sequence
  Description of Artificial Sequence: targeting sequence/synthetic sequence
GTSQLGQQLSEHLKDALQAE

SEQ ID NO: 7098 - protein, 20 aa, Artificial Sequence
  Description of Artificial Sequence: targeting sequence/synthetic sequence
KGLPGLQGIKGDQGDHGVPG

SEQ ID NO: 7099 - protein, 20 aa, Artificial Sequence
  Description of Artificial Sequence: targeting sequence/synthetic sequence
RSQRAGLQFPVGRIHRHLKT

SEQ ID NO: 7100 - protein, 20 aa, Artificial Sequence
  Description of Artificial Sequence: targeting sequence/synthetic sequence
TMGLNTADTARLNANIRYVN

SEQ ID NO: 7101 - protein, 20 aa, Artificial Sequence
  Description of Artificial Sequence: targeting sequence/synthetic sequence
GTGSGGGGPGGSGGVGGGSG

SEQ ID NO: 7102 - protein, 20 aa, Artificial Sequence
  Description of Artificial Sequence: targeting sequence/synthetic sequence
LEAFNRAVKSLQNASAIESI

SEQ ID NO: 7103 - protein, 20 aa, Artificial Sequence
  Description of Artificial Sequence: targeting sequence/synthetic sequence
QGYRHMNLTSTNKYWTSSNG

SEQ ID NO: 7104 - protein, 20 aa, Artificial Sequence
  Description of Artificial Sequence: targeting sequence/synthetic sequence
FPVGRIHRLLRKGNYAERIG

SEQ ID NO: 7105 - protein, 20 aa, Artificial Sequence
  Description of Artificial Sequence: targeting sequence/synthetic sequence
GSIGIPGMPGSPGLKGSPGS

SEQ ID NO: 7106 - protein, 20 aa, Artificial Sequence
  Description of Artificial Sequence: targeting sequence/synthetic sequence
EGPRGFPGIQGRKGEPGEGA

SEQ ID NO: 7107 - protein, 20 aa, Artificial Sequence
  Description of Artificial Sequence: targeting sequence/synthetic sequence
HSTTLYVTGKQNELSDTAGR

SEQ ID NO: 7108 - protein, 20 aa, Artificial Sequence
  Description of Artificial Sequence: targeting sequence/synthetic sequence
SSRAGLQFPVGRIHRLLRKG

SEQ ID NO: 7109 - protein, 20 aa, Artificial Sequence
  Description of Artificial Sequence: targeting sequence/synthetic sequence
GSLQPSSIQIFANTSTLHGI

SEQ ID NO: 7110 - protein, 20 aa, Artificial Sequence
  Description of Artificial Sequence: targeting sequence/synthetic sequence
SLGPTLNLSSGESRLLAARF

SEQ ID NO: 7111 - protein, 20 aa, Artificial Sequence
  Description of Artificial Sequence: targeting sequence/synthetic sequence
SFVNDIFERIAGEASRLAHY

SEQ ID NO: 7112 - protein, 20 aa, Artificial Sequence
  Description of Artificial Sequence: targeting sequence/synthetic sequence
YRHMNLTSTNKYWTSSNGTQ

SEQ ID NO: 7113 - protein, 20 aa, Artificial Sequence
  Description of Artificial Sequence: targeting sequence/synthetic sequence
SGGGGPGGSGGVGGGSGGYT

SEQ ID NO: 7114 - protein, 20 aa, Artificial Sequence
  Description of Artificial Sequence: targeting sequence/synthetic sequence
SLQPSSIQIFANTSTLHGIR

SEQ ID NO: 7115 - protein, 20 aa, Artificial Sequence
  Description of Artificial Sequence: targeting sequence/synthetic sequence
SNQQEGIITVTDMKGNNSHI

SEQ ID NO: 7116 - protein, 20 aa, Artificial Sequence
  Description of Artificial Sequence: targeting sequence/synthetic sequence
EKVYNTRHQEVLREIQDAVA

SEQ ID NO: 7117 - protein, 20 aa, Artificial Sequence
  Description of Artificial Sequence: targeting sequence/synthetic sequence
KKPHRYRPGTVALREIRRYQ

SEQ ID NO: 7118 - protein, 20 aa, Artificial Sequence
  Description of Artificial Sequence: targeting sequence/synthetic sequence
QVVSFLGHNGAGKTTTMSIL

SEQ ID NO: 7119 - protein, 20 aa, Artificial Sequence
  Description of Artificial Sequence: targeting sequence/synthetic sequence
QKNPTNHFPSSEGDSSKPSL

SEQ ID NO: 7120 - protein, 20 aa, Artificial Sequence
  Description of Artificial Sequence: targeting sequence/synthetic sequence
AVSQSSGLAAKFVIHCHIPQ

SEQ ID NO: 7121 - protein, 20 aa, Artificial Sequence
  Description of Artificial Sequence: targeting sequence/synthetic sequence
ISSKAMGIMNSFVNDIFERI

SEQ ID NO: 7122 - protein, 20 aa, Artificial Sequence
  Description of Artificial Sequence: targeting sequence/synthetic sequence
GRLNMHMNVQNGKWDSDPSG

SEQ ID NO: 7123 - protein, 20 aa, Artificial Sequence
  Description of Artificial Sequence: targeting sequence/synthetic sequence
DTAGREINLVDAHLKSEQTE

SEQ ID NO: 7124 - protein, 20 aa, Artificial Sequence
  Description of Artificial Sequence: targeting sequence/synthetic sequence
FPVGRVHRLLRKGNYSERVG

SEQ ID NO: 7125 - protein, 20 aa, Artificial Sequence
  Description of Artificial Sequence: targeting sequence/synthetic sequence
RQAGLVTGMADGVVASNHAG

SEQ ID NO: 7126 - protein, 20 aa, Artificial Sequence
  Description of Artificial Sequence: targeting sequence/synthetic sequence
TRSSRAGLQFPVGRVHRLLR

SEQ ID NO: 7127 - protein, 20 aa, Artificial Sequence
  Description of Artificial Sequence: targeting sequence/synthetic sequence
IRPVQSVASSRRHKRFAGVV

SEQ ID NO: 7128 - protein, 20 aa, Artificial Sequence
  Description of Artificial Sequence: targeting sequence/synthetic sequence
PGTSQLGQQLSEHLKDALQA

SEQ ID NO: 7129 - protein, 20 aa, Artificial Sequence
  Description of Artificial Sequence: targeting sequence/synthetic sequence
DKRLVCKHSMVDRGWGNGCG

SEQ ID NO: 7130 - protein, 20 aa, Artificial Sequence
  Description of Artificial Sequence: targeting sequence/synthetic sequence
SSDSNNLKLNNVRLPRENMS

SEQ ID NO: 7131 - protein, 20 aa, Artificial Sequence
  Description of Artificial Sequence: targeting sequence/synthetic sequence
PELENNKTMNRAENGGRPPH

SEQ ID NO: 7132 - protein, 20 aa, Artificial Sequence
  Description of Artificial Sequence: targeting sequence/synthetic sequence
NSVLNSNAIKNLPPPLGGAA

SEQ ID NO: 7133 - protein, 20 aa, Artificial Sequence
  Description of Artificial Sequence: targeting sequence/synthetic sequence
ESGSSSRSSSNNSSISRPAA

SEQ ID NO: 7134 - protein, 20 aa, Artificial Sequence
  Description of Artificial Sequence: targeting sequence/synthetic sequence
LMQNSTKAPLKRSNVEKVTN

SEQ ID NO: 7135 - protein, 20 aa, Artificial Sequence
  Description of Artificial Sequence: targeting sequence/synthetic sequence
VLNSNAIKNLPPPLGGAAGH

SEQ ID NO: 7136 - protein, 20 aa, Artificial Sequence
  Description of Artificial Sequence: targeting sequence/synthetic sequence
MIVAAIQAEKNRAGSSRQSI

SEQ ID NO: 7137 - protein, 20 aa, Artificial Sequence
  Description of Artificial Sequence: targeting sequence/synthetic sequence
MTNQDNKIVVKNATKSNVNN

SEQ ID NO: 7138 - protein, 20 aa, Artificial Sequence
  Description of Artificial Sequence: targeting sequence/synthetic sequence
LAAAGYDVEKNNSRIKLGLK

SEQ ID NO: 7139 - protein, 20 aa, Artificial Sequence
  Description of Artificial Sequence: targeting sequence/synthetic sequence
VAAIQAEKNRAGSSRQSIQK

SEQ ID NO: 7140 - protein, 20 aa, Artificial Sequence
  Description of Artificial Sequence: targeting sequence/synthetic sequence
GIVVYTGHDTKLMQNSTKAP

SEQ ID NO: 7141 - protein, 20 aa, Artificial Sequence
  Description of Artificial Sequence: targeting sequence/synthetic sequence
ALKENGGARLAEYHAKATEH

SEQ ID NO: 7142 - protein, 20 aa, Artificial Sequence
  Description of Artificial Sequence: targeting sequence/synthetic sequence
RKNGPIDISNTDNFVRKNDL

SEQ ID NO: 7143 - protein, 20 aa, Artificial Sequence
  Description of Artificial Sequence: targeting sequence/synthetic sequence
KEIQNAVNGVKQIKTLIEKT

SEQ ID NO: 7144 - protein, 20 aa, Artificial Sequence
  Description of Artificial Sequence: targeting sequence/synthetic sequence
NKEIQNAVNGVKQIKTLIEK

SEQ ID NO: 7145 - protein, 20 aa, Artificial Sequence
  Description of Artificial Sequence: targeting sequence/synthetic sequence
NGGARLAEYHAKATEHLSTL

SEQ ID NO: 7146 - protein, 20 aa, Artificial Sequence
  Description of Artificial Sequence: targeting sequence/synthetic sequence
ENDNFQDDPHAGLPQLGKRL

SEQ ID NO: 7147 - protein, 20 aa, Artificial Sequence
  Description of Artificial Sequence: targeting sequence/synthetic sequence
SNAIKNLPPPLGGAAGHPGS

SEQ ID NO: 7148 - protein, 20 aa, Artificial Sequence
  Description of Artificial Sequence: targeting sequence/synthetic sequence
SSSRSSSNNSSISRPAAPPE

SEQ ID NO: 7149 - protein, 20 aa, Artificial Sequence
  Description of Artificial Sequence: targeting sequence/synthetic sequence
VDFRIHVENQTRARDDVSRK

SEQ ID NO: 7150 - protein, 20 aa, Artificial Sequence
  Description of Artificial Sequence: targeting sequence/synthetic sequence
QDNTCEEYHTVGPHSCHIPK

SEQ ID NO: 7151 - protein, 20 aa, Artificial Sequence
  Description of Artificial Sequence: targeting sequence/synthetic sequence
RRNGPEFSNDIKKRKVDDKD

SEQ ID NO: 7152 - protein, 20 aa, Artificial Sequence
  Description of Artificial Sequence: targeting sequence/synthetic sequence
GTQGRACNKTAPQASGCDLM

SEQ ID NO: 7153 - protein, 20 aa, Artificial Sequence
  Description of Artificial Sequence: targeting sequence/synthetic sequence
LVGYLDRNLEKNSTKQEILA

SEQ ID NO: 7154 - protein, 20 aa, Artificial Sequence
  Description of Artificial Sequence: targeting sequence/synthetic sequence
MQNSTKAPLKRSNVEKVTNV

SEQ ID NO: 7155 - protein, 20 aa, Artificial Sequence
  Description of Artificial Sequence: targeting sequence/synthetic sequence
GSVGTQGRACNKTAPQASGC

SEQ ID NO: 7156 - protein, 20 aa, Artificial Sequence
  Description of Artificial Sequence: targeting sequence/synthetic sequence
NNKTMNRAENGGRPPHHPFE

SEQ ID NO: 7157 - protein, 20 aa, Artificial Sequence
  Description of Artificial Sequence: targeting sequence/synthetic sequence
GQDNTCEEYHTVGPHSCHIP

SEQ ID NO: 7158 - protein, 20 aa, Artificial Sequence
  Description of Artificial Sequence: targeting sequence/synthetic sequence
KLVGYLDRNLEKNSTKQEIL

SEQ ID NO: 7159 - protein, 20 aa, Artificial Sequence
  Description of Artificial Sequence: targeting sequence/synthetic sequence
IIRKNGPIDISNTDNFVRKN

SEQ ID NO: 7160 - protein, 20 aa, Artificial Sequence
  Description of Artificial Sequence: targeting sequence/synthetic sequence
NDNFQDDPHAGLPQLGKRLP

SEQ ID NO: 7161 - protein, 20 aa, Artificial Sequence
  Description of Artificial Sequence: targeting sequence/synthetic sequence
LPGMTNQDNKIVVKNATKSN

SEQ ID NO: 7162 - protein, 20 aa, Artificial Sequence
  Description of Artificial Sequence: targeting sequence/synthetic sequence
GHDTKLMQNSTKAPLKRSNV

SEQ ID NO: 7163 - protein, 20 aa, Artificial Sequence
  Description of Artificial Sequence: targeting sequence/synthetic sequence
GGARLAEYHAKATEHLSTLS

SEQ ID NO: 7164 - protein, 20 aa, Artificial Sequence
  Description of Artificial Sequence: targeting sequence/synthetic sequence
DNTCEEYHTVGPHSCHIPKD

SEQ ID NO: 7165 - protein, 20 aa, Artificial Sequence
  Description of Artificial Sequence: targeting sequence/synthetic sequence
VIIRKNGPIDISNTDNFVRK

SEQ ID NO: 7166 - protein, 20 aa, Artificial Sequence
  Description of Artificial Sequence: targeting sequence/synthetic sequence
YDTSDSDDYHLLKDLEEGIQ

SEQ ID NO: 7167 - protein, 20 aa, Artificial Sequence
  Description of Artificial Sequence: targeting sequence/synthetic sequence
VYDTSDSDDYHLLKDLEEGI

SEQ ID NO: 7168 - protein, 20 aa, Artificial Sequence
  Description of Artificial Sequence: targeting sequence/synthetic sequence
TYIEESLNKITQNSGNDVRN

SEQ ID NO: 7169 - protein, 20 aa, Artificial Sequence
  Description of Artificial Sequence: targeting sequence/synthetic sequence
ESLNKITQNSGNDVRNFEEF

SEQ ID NO: 7170 - protein, 20 aa, Artificial Sequence
  Description of Artificial Sequence: targeting sequence/synthetic sequence
AFRTGVPPKNVEYTEGEEAK

SEQ ID NO: 7171 - protein, 20 aa, Artificial Sequence
  Description of Artificial Sequence: targeting sequence/synthetic sequence
RWAFRAGVPPKNVEYTEGEE

SEQ ID NO: 7172 - protein, 20 aa, Artificial Sequence
  Description of Artificial Sequence: targeting sequence/synthetic sequence
KMQRAPRDSDAGREGQEPQP

SEQ ID NO: 7173 - protein, 20 aa, Artificial Sequence
  Description of Artificial Sequence: targeting sequence/synthetic sequence
SGATTTAPSLSGKGNPEEED

SEQ ID NO: 7174 - protein, 20 aa, Artificial Sequence
  Description of Artificial Sequence: targeting sequence/synthetic sequence
MQRAPRDSDAGREGQEPQPR

SEQ ID NO: 7175 - protein, 20 aa, Artificial Sequence
  Description of Artificial Sequence: targeting sequence/synthetic sequence
GSSSNSTREPPASGRVALVK

SEQ ID NO: 7176 - protein, 20 aa, Artificial Sequence
  Description of Artificial Sequence: targeting sequence/synthetic sequence
QHQTVLELTETGVEAAAASA

SEQ ID NO: 7177 - protein, 20 aa, Artificial Sequence
  Description of Artificial Sequence: targeting sequence/synthetic sequence
SAMQHQTVLELTETGVEAAA

SEQ ID NO: 7178 - protein, 20 aa, Artificial Sequence
  Description of Artificial Sequence: targeting sequence/synthetic sequence
IHSGATTTAPSLSGKGNPEE

SEQ ID NO: 7179 - protein, 20 aa, Artificial Sequence
  Description of Artificial Sequence: targeting sequence/synthetic sequence
HKVVERTQNVTEKVTQVLSL

SEQ ID NO: 7180 - protein, 20 aa, Artificial Sequence
  Description of Artificial Sequence: targeting sequence/synthetic sequence
RGDADNDMVKIENLTKVYKS

SEQ ID NO: 7181 - protein, 20 aa, Artificial Sequence
  Description of Artificial Sequence: targeting sequence/synthetic sequence
FSNDIKKRKVDDKDSSHYDS

SEQ ID NO: 7182 - protein, 20 aa, Artificial Sequence
  Description of Artificial Sequence: targeting sequence/synthetic sequence
SLKASSTMAKSENLVKSHVQ

SEQ ID NO: 7183 - protein, 20 aa, Artificial Sequence
  Description of Artificial Sequence: targeting sequence/synthetic sequence
DADNDMVKIENLTKVYKSRK

SEQ ID NO: 7184 - protein, 20 aa, Artificial Sequence
  Description of Artificial Sequence: targeting sequence/synthetic sequence
IQRVNNSSTNDNLVRKNDQV

SEQ ID NO: 7185 - protein, 20 aa, Artificial Sequence
  Description of Artificial Sequence: targeting sequence/synthetic sequence
STQNKRANRTEENVSDGSPN

SEQ ID NO: 7186 - protein, 20 aa, Artificial Sequence
  Description of Artificial Sequence: targeting sequence/synthetic sequence
YTGHDTKLMQNSTKAPLKRS

SEQ ID NO: 7187 - protein, 20 aa, Artificial Sequence
  Description of Artificial Sequence: targeting sequence/synthetic sequence
RLENEIPKTSGSEMANKRMK

SEQ ID NO: 7188 - protein, 20 aa, Artificial Sequence
  Description of Artificial Sequence: targeting sequence/synthetic sequence
QNKRANRTEENVSDGSPNAG

SEQ ID NO: 7189 - protein, 20 aa, Artificial Sequence
  Description of Artificial Sequence: targeting sequence/synthetic sequence
QGSKYVNKEIQNAVNGVKQI

SEQ ID NO: 7190 - protein, 20 aa, Artificial Sequence
  Description of Artificial Sequence: targeting sequence/synthetic sequence
LRGDADNDMVKIENLTKVYK

SEQ ID NO: 7191 - protein, 20 aa, Artificial Sequence
  Description of Artificial Sequence: targeting sequence/synthetic sequence
NVDFRIHVENQTRARDDVSR

SEQ ID NO: 7192 - protein, 20 aa, Artificial Sequence
  Description of Artificial Sequence: targeting sequence/synthetic sequence
IKRKVSSSKPEENKIRQEDL

SEQ ID NO: 7193 - protein, 20 aa, Artificial Sequence
  Description of Artificial Sequence: targeting sequence/synthetic sequence
VVKNATKSNVNNAVNTLVER

SEQ ID NO: 7194 - protein, 20 aa, Artificial Sequence
  Description of Artificial Sequence: targeting sequence/synthetic sequence
KGLIDEVNQDFTNRINKLKN

SEQ ID NO: 7195 - protein, 20 aa, Artificial Sequence
  Description of Artificial Sequence: targeting sequence/synthetic sequence
ILTQGQINSTSGLNKESFRY

SEQ ID NO: 7196 - protein, 20 aa, Artificial Sequence
  Description of Artificial Sequence: targeting sequence/synthetic sequence
SSNSTREPPASGRVALVKVL

SEQ ID NO: 7197 - protein, 20 aa, Artificial Sequence
  Description of Artificial Sequence: targeting sequence/synthetic sequence
TAAHPELKTPLTANITKSGN

SEQ ID NO: 7198 - protein, 20 aa, Artificial Sequence
  Description of Artificial Sequence: targeting sequence/synthetic sequence
KVVERTQNVTEKVTQVLSLG

SEQ ID NO: 7199 - protein, 20 aa, Artificial Sequence
  Description of Artificial Sequence: targeting sequence/synthetic sequence
KRANRTEENVSDGSPNAGSV

SEQ ID NO: 7200 - protein, 20 aa, Artificial Sequence
  Description of Artificial Sequence: targeting sequence/synthetic sequence
WKAAIPSALDTNSSKSTSSF

SEQ ID NO: 7201 - protein, 20 aa, Artificial Sequence
  Description of Artificial Sequence: targeting sequence/synthetic sequence
ALAAGGYDVEKNNSRIKLGL

SEQ ID NO: 7202 - protein, 20 aa, Artificial Sequence
  Description of Artificial Sequence: targeting sequence/synthetic sequence
EKVSVSTQTKKLSASSPRML

SEQ ID NO: 7203 - protein, 20 aa, Artificial Sequence
  Description of Artificial Sequence: targeting sequence/synthetic sequence
NIKRKVSSSKPEENKIRQED

SEQ ID NO: 7204 - protein, 20 aa, Artificial Sequence
  Description of Artificial Sequence: targeting sequence/synthetic sequence
VSKGTLVQTKGTGASGSFKL

SEQ ID NO: 7205 - protein, 20 aa, Artificial Sequence
  Description of Artificial Sequence: targeting sequence/synthetic sequence
ENEIPKTSGSEMANKRMKVK

SEQ ID NO: 7206 - protein, 20 aa, Artificial Sequence
  Description of Artificial Sequence: targeting sequence/synthetic sequence
VSNQTELDREVLVGKVKHAV

SEQ ID NO: 7207 - protein, 20 aa, Artificial Sequence
  Description of Artificial Sequence: targeting sequence/synthetic sequence
GDADNDMVKIENLTKVYKSR

SEQ ID NO: 7208 - protein, 20 aa, Artificial Sequence
  Description of Artificial Sequence: targeting sequence/synthetic sequence
VSATLNSVLNSNAIKNLPPP

SEQ ID NO: 7209 - protein, 20 aa, Artificial Sequence
  Description of Artificial Sequence: targeting sequence/synthetic sequence
NNIKFRAIGHSDNSVPPFNN

SEQ ID NO: 7210 - protein, 20 aa, Artificial Sequence
  Description of Artificial Sequence: targeting sequence/synthetic sequence
KAAIPSALDTNSSKSTSSFP

SEQ ID NO: 7211 - protein, 20 aa, Artificial Sequence
  Description of Artificial Sequence: targeting sequence/synthetic sequence
QSAKDNNIKFRAIGHSDNSV

SEQ ID NO: 7212 - protein, 20 aa, Artificial Sequence
  Description of Artificial Sequence: targeting sequence/synthetic sequence
KNNKIAGVNNRTEYVETTST

SEQ ID NO: 7213 - protein, 20 aa, Artificial Sequence
  Description of Artificial Sequence: targeting sequence/synthetic sequence
NSTREPPASGRVALVKVLDK

SEQ ID NO: 7214 - protein, 20 aa, Artificial Sequence
  Description of Artificial Sequence: targeting sequence/synthetic sequence
SAKDNNIKFRAIGHSDNSVP

SEQ ID NO: 7215 - protein, 20 aa, Artificial Sequence
  Description of Artificial Sequence: targeting sequence/synthetic sequence
KRKVSSSKPEENKIRQEDLT

SEQ ID NO: 7216 - protein, 20 aa, Artificial Sequence
  Description of Artificial Sequence: targeting sequence/synthetic sequence
QAKFVSNQTELDREVLVGKV

SEQ ID NO: 7217 - protein, 20 aa, Artificial Sequence
  Description of Artificial Sequence: targeting sequence/synthetic sequence
PPEPRPQQQPQPRSPAARRA

SEQ ID NO: 7218 - protein, 20 aa, Artificial Sequence
  Description of Artificial Sequence: targeting sequence/synthetic sequence
TVTPKGQLPGGKAPPKAGSV

SEQ ID NO: 7219 - protein, 20 aa, Artificial Sequence
  Description of Artificial Sequence: targeting sequence/synthetic sequence
QGASVNSSSQTAAQVTKGVK

SEQ ID NO: 7220 - protein, 20 aa, Artificial Sequence
  Description of Artificial Sequence: targeting sequence/synthetic sequence
AKFVSNQTELDREVLVGKVK

SEQ ID NO: 7221 - protein, 20 aa, Artificial Sequence
  Description of Artificial Sequence: targeting sequence/synthetic sequence
ASSVETKPGASKVATKTKAT

SEQ ID NO: 7222 - protein, 20 aa, Artificial Sequence
  Description of Artificial Sequence: targeting sequence/synthetic sequence
ALAAAGYDVEKNNSRIKLGI

SEQ ID NO: 7223 - protein, 20 aa, Artificial Sequence
  Description of Artificial Sequence: targeting sequence/synthetic sequence
EPRPQQQPQPRSPAARRAAA

SEQ ID NO: 7224 - protein, 20 aa, Artificial Sequence
  Description of Artificial Sequence: targeting sequence/synthetic sequence
LNSNAIKNLPPPLGGAAGHP

SEQ ID NO: 7225 - protein, 20 aa, Artificial Sequence
  Description of Artificial Sequence: targeting sequence/synthetic sequence
PPELENNKTMNRAENGGRPP

SEQ ID NO: 7226 - protein, 20 aa, Artificial Sequence
  Description of Artificial Sequence: targeting sequence/synthetic sequence
HLTSRHQEAEMAQNAVRLHY

SEQ ID NO: 7227 - protein, 20 aa, Artificial Sequence
  Description of Artificial Sequence: targeting sequence/synthetic sequence
KAYNSAGTGPSSATVNVTTR

SEQ ID NO: 7228 - protein, 20 aa, Artificial Sequence
  Description of Artificial Sequence: targeting sequence/synthetic sequence
KNSRLQFNKVKVEDAGEYVC

SEQ ID NO: 7229 - protein, 20 aa, Artificial Sequence
  Description of Artificial Sequence: targeting sequence/synthetic sequence
SSMSNHTKERVTMTKVTLEN

SEQ ID NO: 7230 - protein, 20 aa, Artificial Sequence
  Description of Artificial Sequence: targeting sequence/synthetic sequence
GQGPNTKAAAPAKGSGSKVV

SEQ ID NO: 7231 - protein, 20 aa, Artificial Sequence
  Description of Artificial Sequence: targeting sequence/synthetic sequence
GPNTKAAAPAKGSGSKVVPA

SEQ ID NO: 7232 - protein, 20 aa, Artificial Sequence
  Description of Artificial Sequence: targeting sequence/synthetic sequence
KALAAGGYDVEKNNSRIKLG

SEQ ID NO: 7233 - protein, 20 aa, Artificial Sequence
  Description of Artificial Sequence: targeting sequence/synthetic sequence
GNNRTIEPEALRRGNMSSLG

SEQ ID NO: 7234 - protein, 20 aa, Artificial Sequence
  Description of Artificial Sequence: targeting sequence/synthetic sequence
LTSRHQEAEMAQNAVRLHYG

SEQ ID NO: 7235 - protein, 20 aa, Artificial Sequence
  Description of Artificial Sequence: targeting sequence/synthetic sequence
YNSAGTGPSSATVNVTTRKP

SEQ ID NO: 7236 - protein, 20 aa, Artificial Sequence
  Description of Artificial Sequence: targeting sequence/synthetic sequence
GPSSATVNVTTRKPPPSQPP

SEQ ID NO: 7237 - protein, 20 aa, Artificial Sequence
  Description of Artificial Sequence: targeting sequence/synthetic sequence
KIQRVNNSSTNDNLVRKNDQ

SEQ ID NO: 7238 - protein, 20 aa, Artificial Sequence
  Description of Artificial Sequence: targeting sequence/synthetic sequence
NRTIEPEALRRGNMSSLGFT

SEQ ID NO: 7239 - protein, 20 aa, Artificial Sequence
  Description of Artificial Sequence: targeting sequence/synthetic sequence
SQTAAQVTKGVKRKADTTTP

SEQ ID NO: 7240 - protein, 20 aa, Artificial Sequence
  Description of Artificial Sequence: targeting sequence/synthetic sequence
ADVKAGPAQTLIRPQDMKGA

SEQ ID NO: 7241 - protein, 20 aa, Artificial Sequence
  Description of Artificial Sequence: targeting sequence/synthetic sequence
GLIDEVNQDFTNRINKLKNS

SEQ ID NO: 7242 - protein, 20 aa, Artificial Sequence
  Description of Artificial Sequence: targeting sequence/synthetic sequence
SVFLKNNKIAGVNNRTEYVE

SEQ ID NO: 7243 - protein, 20 aa, Artificial Sequence
  Description of Artificial Sequence: targeting sequence/synthetic sequence
SATLNSVLNSNAIKNLPPPL

SEQ ID NO: 7244 - protein, 20 aa, Artificial Sequence
  Description of Artificial Sequence: targeting sequence/synthetic sequence
GTQGRLCNRTSPGADGCDTM

SEQ ID NO: 7245 - protein, 20 aa, Artificial Sequence
  Description of Artificial Sequence: targeting sequence/synthetic sequence
HNAKTKPREEQYNSTYRVVS

SEQ ID NO: 7246 - protein, 20 aa, Artificial Sequence
  Description of Artificial Sequence: targeting sequence/synthetic sequence
RARALNESKRVNNGNTAPED

SEQ ID NO: 7247 - protein, 20 aa, Artificial Sequence
  Description of Artificial Sequence: targeting sequence/synthetic sequence
NSRLQFNKVKVEDAGEYVCE

SEQ ID NO: 7248 - protein, 20 aa, Artificial Sequence
  Description of Artificial Sequence: targeting sequence/synthetic sequence
LKNNKIAGVNNRTEYVETTS

SEQ ID NO: 7249 - protein, 20 aa, Artificial Sequence
  Description of Artificial Sequence: targeting sequence/synthetic sequence
GASVNSSSQTAAQVTKGVKR

SEQ ID NO: 7250 - protein, 20 aa, Artificial Sequence
  Description of Artificial Sequence: targeting sequence/synthetic sequence
PKAGQGPNTKAAAPAKGSGS

SEQ ID NO: 7251 - protein, 20 aa, Artificial Sequence
  Description of Artificial Sequence: targeting sequence/synthetic sequence
VSNKALPAPIEKTISKAKGQ

SEQ ID NO: 7252 - protein, 20 aa, Artificial Sequence
  Description of Artificial Sequence: targeting sequence/synthetic sequence
QQAQTPTGKQTDKTKSNMKG

SEQ ID NO: 7253 - protein, 20 aa, Artificial Sequence
  Description of Artificial Sequence: targeting sequence/synthetic sequence
GVSATLNSVLNSNAIKNLPP

SEQ ID NO: 7254 - protein, 20 aa, Artificial Sequence
  Description of Artificial Sequence: targeting sequence/synthetic sequence
AAPPGQKGQANATRIPAKTP

SEQ ID NO: 7255 - protein, 20 aa, Artificial Sequence
  Description of Artificial Sequence: targeting sequence/synthetic sequence
QDNKIVVKNATKSNVNNAVN

SEQ ID NO: 7256 - protein, 20 aa, Artificial Sequence
  Description of Artificial Sequence: targeting sequence/synthetic sequence
LNSVLNSNAIKNLPPPLGGA

SEQ ID NO: 7257 - protein, 20 aa, Artificial Sequence
  Description of Artificial Sequence: targeting sequence/synthetic sequence
VETKPGASKVATKTKATGAS

SEQ ID NO: 7258 - protein, 20 aa, Artificial Sequence
  Description of Artificial Sequence: targeting sequence/synthetic sequence
IIAPKVKDRTHNVTEKVTQV

SEQ ID NO: 7259 - protein, 20 aa, Artificial Sequence
  Description of Artificial Sequence: targeting sequence/synthetic sequence
GLVEVGGSAKYLNNTKKYQN

SEQ ID NO: 7260 - protein, 20 aa, Artificial Sequence
  Description of Artificial Sequence: targeting sequence/synthetic sequence
VKDRTHNVTEKVTQVLSLGA

SEQ ID NO: 7261 - protein, 20 aa, Artificial Sequence
  Description of Artificial Sequence: targeting sequence/synthetic sequence
NKRANRTEENVSDGSPNAGS

SEQ ID NO: 7262 - protein, 20 aa, Artificial Sequence
  Description of Artificial Sequence: targeting sequence/synthetic sequence
WNRQSSTSVIETNKTSVELS

SEQ ID NO: 7263 - protein, 20 aa, Artificial Sequence
  Description of Artificial Sequence: targeting sequence/synthetic sequence
YEAAESDIMKRQPRNPRTDK

SEQ ID NO: 7264 - protein, 20 aa, Artificial Sequence
  Description of Artificial Sequence: targeting sequence/synthetic sequence
FLKNNKIAGVNNRTEYVETT

SEQ ID NO: 7265 - protein, 20 aa, Artificial Sequence
  Description of Artificial Sequence: targeting sequence/synthetic sequence
GWKAAIPSALDTNSSKSTSS

SEQ ID NO: 7266 - protein, 20 aa, Artificial Sequence
  Description of Artificial Sequence: targeting sequence/synthetic sequence
NAKTKPREEQFNSTYRVVSV

SEQ ID NO: 7267 - protein, 20 aa, Artificial Sequence
  Description of Artificial Sequence: targeting sequence/synthetic sequence
DNKIVVKNATKSNVNNAVNT

SEQ ID NO: 7268 - protein, 20 aa, Artificial Sequence
  Description of Artificial Sequence: targeting sequence/synthetic sequence
VFLKNNKIAGVNNRTEYVET

SEQ ID NO: 7269 - protein, 20 aa, Artificial Sequence
  Description of Artificial Sequence: targeting sequence/synthetic sequence
RKLTDMEAQLLNQTSRMDAQ

SEQ ID NO: 7270 - protein, 20 aa, Artificial Sequence
  Description of Artificial Sequence: targeting sequence/synthetic sequence
AYNSAGTGPSSATVNVTTRK

SEQ ID NO: 7271 - protein, 20 aa, Artificial Sequence
  Description of Artificial Sequence: targeting sequence/synthetic sequence
QIRKLTDMEAQLLNQTSRMD

SEQ ID NO: 7272 - protein, 20 aa, Artificial Sequence
  Description of Artificial Sequence: targeting sequence/synthetic sequence
QGPNTKAAAPAKGSGSKVVP

SEQ ID NO: 7273 - protein, 20 aa, Artificial Sequence
  Description of Artificial Sequence: targeting sequence/synthetic sequence
TNQDNKIVVKNATKSNVNNA

SEQ ID NO: 7274 - protein, 20 aa, Artificial Sequence
  Description of Artificial Sequence: targeting sequence/synthetic sequence
RLQFNKVKVEDAGEYVCEAE

SEQ ID NO: 7275 - protein, 20 aa, Artificial Sequence
  Description of Artificial Sequence: targeting sequence/synthetic sequence
SKYVNKEIQNAVNGVKQIKT

SEQ ID NO: 7276 - protein, 20 aa, Artificial Sequence
  Description of Artificial Sequence: targeting sequence/synthetic sequence
TGPSSATVNVTTRKPPPSQP

SEQ ID NO: 7277 - protein, 20 aa, Artificial Sequence
  Description of Artificial Sequence: targeting sequence/synthetic sequence
KYVNKEIQNAVNGVKQIKTL

SEQ ID NO: 7278 - protein, 20 aa, Artificial Sequence
  Description of Artificial Sequence: targeting sequence/synthetic sequence
IKSLVSKGTLVQTKGTGASG

SEQ ID NO: 7279 - protein, 20 aa, Artificial Sequence
  Description of Artificial Sequence: targeting sequence/synthetic sequence
TEKALIKDFQGTPTFTYKAA

SEQ ID NO: 7280 - protein, 20 aa, Artificial Sequence
  Description of Artificial Sequence: targeting sequence/synthetic sequence
ENNKTMNRAENGGRPPHHPF

SEQ ID NO: 7281 - protein, 20 aa, Artificial Sequence
  Description of Artificial Sequence: targeting sequence/synthetic sequence
LGVSATLNSVLNSNAIKNLP

SEQ ID NO: 7282 - protein, 20 aa, Artificial Sequence
  Description of Artificial Sequence: targeting sequence/synthetic sequence
EYANEKHMLALAPNSTARRQ

SEQ ID NO: 7283 - protein, 20 aa, Artificial Sequence
  Description of Artificial Sequence: targeting sequence/synthetic sequence
GMTNQDNKIVVKNATKSNVN

SEQ ID NO: 7284 - protein, 20 aa, Artificial Sequence
  Description of Artificial Sequence: targeting sequence/synthetic sequence
LVSKGTLVQTKGTGASGSFK

SEQ ID NO: 7285 - protein, 20 aa, Artificial Sequence
  Description of Artificial Sequence: targeting sequence/synthetic sequence
TVGNQTSTKITNLKGSVLYH

SEQ ID NO: 7286 - protein, 20 aa, Artificial Sequence
  Description of Artificial Sequence: targeting sequence/synthetic sequence
QFNKVKVEDAGEYVCEAENI

SEQ ID NO: 7287 - protein, 20 aa, Artificial Sequence
  Description of Artificial Sequence: targeting sequence/synthetic sequence
LATNLIKSGVATKGLNVHGK

SEQ ID NO: 7288 - protein, 20 aa, Artificial Sequence
  Description of Artificial Sequence: targeting sequence/synthetic sequence
PKGQLPGGKAPPKAGSVPSS

SEQ ID NO: 7289 - protein, 20 aa, Artificial Sequence
  Description of Artificial Sequence: targeting sequence/synthetic sequence
GSKYVNKEIQNAVNGVKQIK

SEQ ID NO: 7290 - protein, 20 aa, Artificial Sequence
  Description of Artificial Sequence: targeting sequence/synthetic sequence
SSVETKPGASKVATKTKATG

SEQ ID NO: 7291 - protein, 20 aa, Artificial Sequence
  Description of Artificial Sequence: targeting sequence/synthetic sequence
TGHDTKLMQNSTKAPLKRSN

SEQ ID NO: 7292 - protein, 20 aa, Artificial Sequence
  Description of Artificial Sequence: targeting sequence/synthetic sequence
REAAANTNRPSPGGHERKLV

SEQ ID NO: 7293 - protein, 20 aa, Artificial Sequence
  Description of Artificial Sequence: targeting sequence/synthetic sequence
PGQKGQANATRIPAKTPPAP

SEQ ID NO: 7294 - protein, 20 aa, Artificial Sequence
  Description of Artificial Sequence: targeting sequence/synthetic sequence
VYTGHDTKLMQNSTKAPLKR

SEQ ID NO: 7295 - protein, 20 aa, Artificial Sequence
  Description of Artificial Sequence: targeting sequence/synthetic sequence
RKKENELPTTPVKKDSPKNI

SEQ ID NO: 7296 - protein, 20 aa, Artificial Sequence
  Description of Artificial Sequence: targeting sequence/synthetic sequence
PRKSSIVKRPRSAELSEDDL

SEQ ID NO: 7297 - protein, 20 aa, Artificial Sequence
  Description of Artificial Sequence: targeting sequence/synthetic sequence
LENNKTMNRAENGGRPPHHP

SEQ ID NO: 7298 - protein, 20 aa, Artificial Sequence
  Description of Artificial Sequence: targeting sequence/synthetic sequence
ADNDMVKIENLTKVYKSRKI

SEQ ID NO: 7299 - protein, 20 aa, Artificial Sequence
  Description of Artificial Sequence: targeting sequence/synthetic sequence
YVNKEIQNAVNGVKQIKTLI

SEQ ID NO: 7300 - protein, 20 aa, Artificial Sequence
  Description of Artificial Sequence: targeting sequence/synthetic sequence
LLQSAKDNNIKFRAIGHSDN

SEQ ID NO: 7301 - protein, 20 aa, Artificial Sequence
  Description of Artificial Sequence: targeting sequence/synthetic sequence
NNAILRANLPKSKGNPAAYG

SEQ ID NO: 7302 - protein, 20 aa, Artificial Sequence
  Description of Artificial Sequence: targeting sequence/synthetic sequence
GTGPSSATVNVTTRKPPPSQ

SEQ ID NO: 7303 - protein, 20 aa, Artificial Sequence
  Description of Artificial Sequence: targeting sequence/synthetic sequence
VLSTKQTEDYCLASNKVGRC

SEQ ID NO: 7304 - protein, 20 aa, Artificial Sequence
  Description of Artificial Sequence: targeting sequence/synthetic sequence
AGEYVCEAENILGKDTVRGR

SEQ ID NO: 7305 - protein, 20 aa, Artificial Sequence
  Description of Artificial Sequence: targeting sequence/synthetic sequence
LENIKRKVSSSKPEENKIRQ

SEQ ID NO: 7306 - protein, 20 aa, Artificial Sequence
  Description of Artificial Sequence: targeting sequence/synthetic sequence
ATEKARKQGGAAKDTRAQSG

SEQ ID NO: 7307 - protein, 20 aa, Artificial Sequence
  Description of Artificial Sequence: targeting sequence/synthetic sequence
GAATEKARKQGGAAKDTRAQ

SEQ ID NO: 7308 - protein, 20 aa, Artificial Sequence
  Description of Artificial Sequence: targeting sequence/synthetic sequence
AANTNRPSPGGHERKLVTKL

SEQ ID NO: 7309 - protein, 20 aa, Artificial Sequence
  Description of Artificial Sequence: targeting sequence/synthetic sequence
NQDNKIVVKNATKSNVNNAV

SEQ ID NO: 7310 - protein, 20 aa, Artificial Sequence
  Description of Artificial Sequence: targeting sequence/synthetic sequence
TTPPPSSRPRTTASVPRTTV

SEQ ID NO: 7311 - protein, 20 aa, Artificial Sequence
  Description of Artificial Sequence: targeting sequence/synthetic sequence
LYQIPPQPRRAAPTTPPPPV

SEQ ID NO: 7312 - protein, 20 aa, Artificial Sequence
  Description of Artificial Sequence: targeting sequence/synthetic sequence
YLPQQQKKKLQTDIKENGGK

SEQ ID NO: 7313 - protein, 20 aa, Artificial Sequence
  Description of Artificial Sequence: targeting sequence/synthetic sequence
EKALIKDFQGTPTFTYKAAH

SEQ ID NO: 7314 - protein, 20 aa, Artificial Sequence
  Description of Artificial Sequence: targeting sequence/synthetic sequence
TPSAGGAASSRTPNRISTRL

SEQ ID NO: 7315 - protein, 20 aa, Artificial Sequence
  Description of Artificial Sequence: targeting sequence/synthetic sequence
QTAAQVTKGVKRKADTTTPA

SEQ ID NO: 7316 - protein, 20 aa, Artificial Sequence
  Description of Artificial Sequence: targeting sequence/synthetic sequence
KVKDRTHNVTEKVTQVLSLG

SEQ ID NO: 7317 - protein, 20 aa, Artificial Sequence
  Description of Artificial Sequence: targeting sequence/synthetic sequence
QNRSKTPKNQEALRMANVAE

SEQ ID NO: 7318 - protein, 20 aa, Artificial Sequence
  Description of Artificial Sequence: targeting sequence/synthetic sequence
PIEKVSVSTQTKKLSASSPR

SEQ ID NO: 7319 - protein, 20 aa, Artificial Sequence
  Description of Artificial Sequence: targeting sequence/synthetic sequence
GTQGRECNRTSEGADGCNLL

SEQ ID NO: 7320 - protein, 20 aa, Artificial Sequence
  Description of Artificial Sequence: targeting sequence/synthetic sequence
VTPKGQLPGGKAPPKAGSVP

SEQ ID NO: 7321 - protein, 20 aa, Artificial Sequence
  Description of Artificial Sequence: targeting sequence/synthetic sequence
GAAKDTRAQSGEARKVPPKP

SEQ ID NO: 7322 - protein, 20 aa, Artificial Sequence
  Description of Artificial Sequence: targeting sequence/synthetic sequence
KDFDVIRNVIKDNATFSRKN

SEQ ID NO: 7323 - protein, 20 aa, Artificial Sequence
  Description of Artificial Sequence: targeting sequence/synthetic sequence
SNKGLPAPIEKTISKTKGQP

SEQ ID NO: 7324 - protein, 20 aa, Artificial Sequence
  Description of Artificial Sequence: targeting sequence/synthetic sequence
DTKLMQNSTKAPLKRSNVEK

SEQ ID NO: 7325 - protein, 20 aa, Artificial Sequence
  Description of Artificial Sequence: targeting sequence/synthetic sequence
SSATVNVTTRKPPPSQPPGN

SEQ ID NO: 7326 - protein, 20 aa, Artificial Sequence
  Description of Artificial Sequence: targeting sequence/synthetic sequence
AKTKPREEQYNSTYRVVSVL

SEQ ID NO: 7327 - protein, 20 aa, Artificial Sequence
  Description of Artificial Sequence: targeting sequence/synthetic sequence
APRAAPAARGSRPGPAGTMA

SEQ ID NO: 7328 - protein, 20 aa, Artificial Sequence
  Description of Artificial Sequence: targeting sequence/synthetic sequence
LKSLVSKGTLVQTKGTGASG

SEQ ID NO: 7329 - protein, 20 aa, Artificial Sequence
  Description of Artificial Sequence: targeting sequence/synthetic sequence
VNSSSQTAAQVTKGVKRKAD

SEQ ID NO: 7330 - protein, 20 aa, Artificial Sequence
  Description of Artificial Sequence: targeting sequence/synthetic sequence
FIDLPRKKISNFTNKNMKEV

SEQ ID NO: 7331 - protein, 20 aa, Artificial Sequence
  Description of Artificial Sequence: targeting sequence/synthetic sequence
PQAAGGGQKKGDKAPGGGGA

SEQ ID NO: 7332 - protein, 20 aa, Artificial Sequence
  Description of Artificial Sequence: targeting sequence/synthetic sequence
ATPSAGGAASSRTPNRISTR

SEQ ID NO: 7333 - protein, 20 aa, Artificial Sequence
  Description of Artificial Sequence: targeting sequence/synthetic sequence
RHLTSRHQEAEMAQNAVRLH

SEQ ID NO: 7334 - protein, 20 aa, Artificial Sequence
  Description of Artificial Sequence: targeting sequence/synthetic sequence
EKHMLALAPNSTARRQLASL

SEQ ID NO: 7335 - protein, 20 aa, Artificial Sequence
  Description of Artificial Sequence: targeting sequence/synthetic sequence
TQGQINSTSGLNKESFRYLK

SEQ ID NO: 7336 - protein, 20 aa, Artificial Sequence
  Description of Artificial Sequence: targeting sequence/synthetic sequence
NLPRKSSIVKRPRSAELSED

SEQ ID NO: 7337 - protein, 20 aa, Artificial Sequence
  Description of Artificial Sequence: targeting sequence/synthetic sequence
LVEVGGSAKYLNNTKKYQNQ

SEQ ID NO: 7338 - protein, 20 aa, Artificial Sequence
  Description of Artificial Sequence: targeting sequence/synthetic sequence
AAQVTKGVKRKADTTTPATS

SEQ ID NO: 7339 - protein, 20 aa, Artificial Sequence
  Description of Artificial Sequence: targeting sequence/synthetic sequence
ANEKHMLALAPNSTARRQLA

SEQ ID NO: 7340 - protein, 20 aa, Artificial Sequence
  Description of Artificial Sequence: targeting sequence/synthetic sequence
KYLPQQQKKKLQTDIKENGG

SEQ ID NO: 7341 - protein, 20 aa, Artificial Sequence
  Description of Artificial Sequence: targeting sequence/synthetic sequence
VHNAKTKPREEQYNSTYRVV

SEQ ID NO: 7342 - protein, 20 aa, Artificial Sequence
  Description of Artificial Sequence: targeting sequence/synthetic sequence
TPKGQLPGGKAPPKAGSVPS

SEQ ID NO: 7343 - protein, 20 aa, Artificial Sequence
  Description of Artificial Sequence: targeting sequence/synthetic sequence
TSVFLKNNKIAGVNNRTEYV

SEQ ID NO: 7344 - protein, 20 aa, Artificial Sequence
  Description of Artificial Sequence: targeting sequence/synthetic sequence
DIFERIAGEASRLAHYNKRS

SEQ ID NO: 7345 - protein, 20 aa, Artificial Sequence
  Description of Artificial Sequence: targeting sequence/synthetic sequence
YKNKDMIQTLTNKSKIQNVG

SEQ ID NO: 7346 - protein, 20 aa, Artificial Sequence
  Description of Artificial Sequence: targeting sequence/synthetic sequence
GQANATRIPAKTPPAPKTPP

SEQ ID NO: 7347 - protein, 20 aa, Artificial Sequence
  Description of Artificial Sequence: targeting sequence/synthetic sequence
NKIVVKNATKSNVNNAVNTL

SEQ ID NO: 7348 - protein, 20 aa, Artificial Sequence
  Description of Artificial Sequence: targeting sequence/synthetic sequence
GTRGRTCNKTSKAIDGCELL

SEQ ID NO: 7349 - protein, 20 aa, Artificial Sequence
  Description of Artificial Sequence: targeting sequence/synthetic sequence
AAPRAAPAARGSRPGPAGTM

SEQ ID NO: 7350 - protein, 20 aa, Artificial Sequence
  Description of Artificial Sequence: targeting sequence/synthetic sequence
IHVENQTRARDDVSRKQLRL

SEQ ID NO: 7351 - protein, 20 aa, Artificial Sequence
  Description of Artificial Sequence: targeting sequence/synthetic sequence
LKKALAAGGYDVEKNNSRIK

SEQ ID NO: 7352 - protein, 20 aa, Artificial Sequence
  Description of Artificial Sequence: targeting sequence/synthetic sequence
NSAGTGPSSATVNVTTRKPP

SEQ ID NO: 7353 - protein, 20 aa, Artificial Sequence
  Description of Artificial Sequence: targeting sequence/synthetic sequence
VCEAENILGKDTVRGRLYVN

SEQ ID NO: 7354 - protein, 20 aa, Artificial Sequence
  Description of Artificial Sequence: targeting sequence/synthetic sequence
KQGGAAKDTRAQSGEARKVP

SEQ ID NO: 7355 - protein, 20 aa, Artificial Sequence
  Description of Artificial Sequence: targeting sequence/synthetic sequence
NAKTKPREEQYNSTYRVVSV

SEQ ID NO: 7356 - protein, 20 aa, Artificial Sequence
  Description of Artificial Sequence: targeting sequence/synthetic sequence
QANATRIPAKTPPAPKTPPS

SEQ ID NO: 7357 - protein, 20 aa, Artificial Sequence
  Description of Artificial Sequence: targeting sequence/synthetic sequence
QTTPPPSSRPRTTASVPRTT

SEQ ID NO: 7358 - protein, 20 aa, Artificial Sequence
  Description of Artificial Sequence: targeting sequence/synthetic sequence
IAPKVKDRTHNVTEKVTQVL

SEQ ID NO: 7359 - protein, 20 aa, Artificial Sequence
  Description of Artificial Sequence: targeting sequence/synthetic sequence
EAAESDIMKRQPRNPRTDKL

SEQ ID NO: 7360 - protein, 20 aa, Artificial Sequence
  Description of Artificial Sequence: targeting sequence/synthetic sequence
RRKKENELPTTPVKKDSPKN

SEQ ID NO: 7361 - protein, 20 aa, Artificial Sequence
  Description of Artificial Sequence: targeting sequence/synthetic sequence
YRWNRQSSTSVIETNKTSVE

SEQ ID NO: 7362 - protein, 20 aa, Artificial Sequence
  Description of Artificial Sequence: targeting sequence/synthetic sequence
AGTGPSSATVNVTTRKPPPS

SEQ ID NO: 7363 - protein, 20 aa, Artificial Sequence
  Description of Artificial Sequence: targeting sequence/synthetic sequence
RKEGKMQRAPRDSDAGREGQ

SEQ ID NO: 7364 - protein, 20 aa, Artificial Sequence
  Description of Artificial Sequence: targeting sequence/synthetic sequence
PPGQKGQANATRIPAKTPPA

SEQ ID NO: 7365 - protein, 20 aa, Artificial Sequence
  Description of Artificial Sequence: targeting sequence/synthetic sequence
KDMIQTLTNKSKIQNVGGTY

SEQ ID NO: 7366 - protein, 20 aa, Artificial Sequence
  Description of Artificial Sequence: targeting sequence/synthetic sequence
KKALAAAGYDVEKNNSRIKL

SEQ ID NO: 7367 - protein, 20 aa, Artificial Sequence
  Description of Artificial Sequence: targeting sequence/synthetic sequence
YAVKVVKKADMINKNMTHQV

SEQ ID NO: 7368 - protein, 20 aa, Artificial Sequence
  Description of Artificial Sequence: targeting sequence/synthetic sequence
GGLVEVGGSAKYLNNTKKYQ

SEQ ID NO: 7369 - protein, 20 aa, Artificial Sequence
  Description of Artificial Sequence: targeting sequence/synthetic sequence
IRTVGNQTSTKITNLKGSVL

SEQ ID NO: 7370 - protein, 20 aa, Artificial Sequence
  Description of Artificial Sequence: targeting sequence/synthetic sequence
KREAAANTNRPSPGGHERKL

SEQ ID NO: 7371 - protein, 20 aa, Artificial Sequence
  Description of Artificial Sequence: targeting sequence/synthetic sequence
VENQTRARDDVSRKQLRLYQ

SEQ ID NO: 7372 - protein, 20 aa, Artificial Sequence
  Description of Artificial Sequence: targeting sequence/synthetic sequence
LAYEAAESDIMKRQPRNPRT

SEQ ID NO: 7373 - protein, 20 aa, Artificial Sequence
  Description of Artificial Sequence: targeting sequence/synthetic sequence
QAQTPTGKQTDKTKSNMKGF

SEQ ID NO: 7374 - protein, 20 aa, Artificial Sequence
  Description of Artificial Sequence: targeting sequence/synthetic sequence
VEVGGSAKYLNNTKKYQNQS

SEQ ID NO: 7375 - protein, 20 aa, Artificial Sequence
  Description of Artificial Sequence: targeting sequence/synthetic sequence
GQQAQTPTGKQTDKTKSNMK

SEQ ID NO: 7376 - protein, 20 aa, Artificial Sequence
  Description of Artificial Sequence: targeting sequence/synthetic sequence
KKALAAGGYDVEKNNSRIKL

SEQ ID NO: 7377 - protein, 20 aa, Artificial Sequence
  Description of Artificial Sequence: targeting sequence/synthetic sequence
AVKVVKKADMINKNMTHQVQ

SEQ ID NO: 7378 - protein, 20 aa, Artificial Sequence
  Description of Artificial Sequence: targeting sequence/synthetic sequence
ATARATTASRLPSSAVTPRA

SEQ ID NO: 7379 - protein, 20 aa, Artificial Sequence
  Description of Artificial Sequence: targeting sequence/synthetic sequence
KLMQNSTKAPLKRSNVEKVT

SEQ ID NO: 7380 - protein, 20 aa, Artificial Sequence
  Description of Artificial Sequence: targeting sequence/synthetic sequence
APPGQKGQANATRIPAKTPP

SEQ ID NO: 7381 - protein, 20 aa, Artificial Sequence
  Description of Artificial Sequence: targeting sequence/synthetic sequence
IDLPRKKISNFTNKNMKEVK

SEQ ID NO: 7382 - protein, 20 aa, Artificial Sequence
  Description of Artificial Sequence: targeting sequence/synthetic sequence
AGGGQKKGDKAPGGGGANLK

SEQ ID NO: 7383 - protein, 20 aa, Artificial Sequence
  Description of Artificial Sequence: targeting sequence/synthetic sequence
DRKSNTRNNMIQTKPTGTQQ

SEQ ID NO: 7384 - protein, 20 aa, Artificial Sequence
  Description of Artificial Sequence: targeting sequence/synthetic sequence
LSTKQTEDYCLASNKVGRCR

SEQ ID NO: 7385 - protein, 20 aa, Artificial Sequence
  Description of Artificial Sequence: targeting sequence/synthetic sequence
KSNTRNNMIQTKPTGTQQST

SEQ ID NO: 7386 - protein, 20 aa, Artificial Sequence
  Description of Artificial Sequence: targeting sequence/synthetic sequence
SQNRSKTPKNQEALRMANVA

SEQ ID NO: 7387 - protein, 20 aa, Artificial Sequence
  Description of Artificial Sequence: targeting sequence/synthetic sequence
YQIPPQPRRAAPTTPPPPVK

SEQ ID NO: 7388 - protein, 20 aa, Artificial Sequence
  Description of Artificial Sequence: targeting sequence/synthetic sequence
KTIIAPKVKDRTHNVTEKVT

SEQ ID NO: 7389 - protein, 20 aa, Artificial Sequence
  Description of Artificial Sequence: targeting sequence/synthetic sequence
TKQTEDYCLASNKVGRCRGS

SEQ ID NO: 7390 - protein, 20 aa, Artificial Sequence
  Description of Artificial Sequence: targeting sequence/synthetic sequence
RIHVENQTRARDDVSRKQLR

SEQ ID NO: 7391 - protein, 20 aa, Artificial Sequence
  Description of Artificial Sequence: targeting sequence/synthetic sequence
QKGQANATRIPAKTPPAPKT

SEQ ID NO: 7392 - protein, 20 aa, Artificial Sequence
  Description of Artificial Sequence: targeting sequence/synthetic sequence
ELSFSVSQVERSLREGHYAQ

SEQ ID NO: 7393 - protein, 20 aa, Artificial Sequence
  Description of Artificial Sequence: targeting sequence/synthetic sequence
ESCSPSEADDTKALIQPSKC

SEQ ID NO: 7394 - protein, 20 aa, Artificial Sequence
  Description of Artificial Sequence: targeting sequence/synthetic sequence
IPSPLDAAVECHRGECQAEG

SEQ ID NO: 7395 - protein, 20 aa, Artificial Sequence
  Description of Artificial Sequence: targeting sequence/synthetic sequence
GIPVKVSATVSSPGSVPEVQ

SEQ ID NO: 7396 - protein, 20 aa, Artificial Sequence
  Description of Artificial Sequence: targeting sequence/synthetic sequence
FRDTQAAIKGQNPSATFGDV

SEQ ID NO: 7397 - protein, 20 aa, Artificial Sequence
  Description of Artificial Sequence: targeting sequence/synthetic sequence
VSGVLGIEDYSVSQTTLDNV

SEQ ID NO: 7398 - protein, 20 aa, Artificial Sequence
  Description of Artificial Sequence: targeting sequence/synthetic sequence
TDHVIRRETETTFSGSHSCS

SEQ ID NO: 7399 - protein, 20 aa, Artificial Sequence
  Description of Artificial Sequence: targeting sequence/synthetic sequence
TMPETPTGDSDPQPAPKKMK

SEQ ID NO: 7400 - protein, 20 aa, Artificial Sequence
  Description of Artificial Sequence: targeting sequence/synthetic sequence
PDGGLMLPLREPVVTLEGHT

SEQ ID NO: 7401 - protein, 20 aa, Artificial Sequence
  Description of Artificial Sequence: targeting sequence/synthetic sequence
KSSIVKRPRSAELSEDDLLS

SEQ ID NO: 7402 - protein, 20 aa, Artificial Sequence
  Description of Artificial Sequence: targeting sequence/synthetic sequence
ASLSVKEPTRIELTPKRTEL

SEQ ID NO: 7403 - protein, 20 aa, Artificial Sequence
  Description of Artificial Sequence: targeting sequence/synthetic sequence
ELAKHAVSEGTKAVTKYTSS

SEQ ID NO: 7404 - protein, 20 aa, Artificial Sequence
  Description of Artificial Sequence: targeting sequence/synthetic sequence
KITANTTDEPTTQPTTEPTT

SEQ ID NO: 7405 - protein, 20 aa, Artificial Sequence
  Description of Artificial Sequence: targeting sequence/synthetic sequence
HVAMEMKEDINTKKEDMMFH

SEQ ID NO: 7406 - protein, 20 aa, Artificial Sequence
  Description of Artificial Sequence: targeting sequence/synthetic sequence
TLSDADRKGGNSSVKLEAGL

SEQ ID NO: 7407 - protein, 20 aa, Artificial Sequence
  Description of Artificial Sequence: targeting sequence/synthetic sequence
PEASKLNKRDGCSSGGTFCG

SEQ ID NO: 7408 - protein, 20 aa, Artificial Sequence
  Description of Artificial Sequence: targeting sequence/synthetic sequence
QVLVPAGSARPVAFSVVPTA

SEQ ID NO: 7409 - protein, 20 aa, Artificial Sequence
  Description of Artificial Sequence: targeting sequence/synthetic sequence
GMLPKPQEQDEKDNTKRFLF

SEQ ID NO: 7410 - protein, 20 aa, Artificial Sequence
  Description of Artificial Sequence: targeting sequence/synthetic sequence
VLTEEHQIGTVCKRDQSDRG

SEQ ID NO: 7411 - protein, 20 aa, Artificial Sequence
  Description of Artificial Sequence: targeting sequence/synthetic sequence
GTLPAEYPLKPGEKAPKVRR

SEQ ID NO: 7412 - protein, 20 aa, Artificial Sequence
  Description of Artificial Sequence: targeting sequence/synthetic sequence
PGKAGERGVPGPPGAVGPAG

SEQ ID NO: 7413 - protein, 20 aa, Artificial Sequence
  Description of Artificial Sequence: targeting sequence/synthetic sequence
ESRKLEKSEDEPPLTLPKPS

SEQ ID NO: 7414 - protein, 20 aa, Artificial Sequence
  Description of Artificial Sequence: targeting sequence/synthetic sequence
TQGRACNKTAPQASGCDLMC

SEQ ID NO: 7415 - protein, 20 aa, Artificial Sequence
  Description of Artificial Sequence: targeting sequence/synthetic sequence
DATNRRIMNVHEAVNCLETL

SEQ ID NO: 7416 - protein, 20 aa, Artificial Sequence
  Description of Artificial Sequence: targeting sequence/synthetic sequence
EKLPPKKKRLRLADMEHSSG

SEQ ID NO: 7417 - protein, 20 aa, Artificial Sequence
  Description of Artificial Sequence: targeting sequence/synthetic sequence
ISVTDPSGKSLLLDPPTNVR

SEQ ID NO: 7418 - protein, 20 aa, Artificial Sequence
  Description of Artificial Sequence: targeting sequence/synthetic sequence
QTGLAEQCAGIRKRPATDDS

SEQ ID NO: 7419 - protein, 20 aa, Artificial Sequence
  Description of Artificial Sequence: targeting sequence/synthetic sequence
FLEVPEAQEDVEATFPVHQP

SEQ ID NO: 7420 - protein, 20 aa, Artificial Sequence
  Description of Artificial Sequence: targeting sequence/synthetic sequence
NVPHEDICEDSDIDGDYRVQ

SEQ ID NO: 7421 - protein, 20 aa, Artificial Sequence
  Description of Artificial Sequence: targeting sequence/synthetic sequence
ISVTDPSGKSLLLDPPSNIR

SEQ ID NO: 7422 - protein, 20 aa, Artificial Sequence
  Description of Artificial Sequence: targeting sequence/synthetic sequence
AEAEKQYEDSCRVYQASSPD

SEQ ID NO: 7423 - protein, 20 aa, Artificial Sequence
  Description of Artificial Sequence: targeting sequence/synthetic sequence
SPSPVPKSPSVDKYNVSGTN

SEQ ID NO: 7424 - protein, 20 aa, Artificial Sequence
  Description of Artificial Sequence: targeting sequence/synthetic sequence
AAASETNWESVTSSISGVSY

SEQ ID NO: 7425 - protein, 20 aa, Artificial Sequence
  Description of Artificial Sequence: targeting sequence/synthetic sequence
CRMPPPCSDSCDFDDPRLLK

SEQ ID NO: 7426 - protein, 20 aa, Artificial Sequence
  Description of Artificial Sequence: targeting sequence/synthetic sequence
PEAQEDVEATFPVHQPGNYS

SEQ ID NO: 7427 - protein, 20 aa, Artificial Sequence
  Description of Artificial Sequence: targeting sequence/synthetic sequence
HVIRRETETTFSGSHSCSPS

SEQ ID NO: 7428 - protein, 20 aa, Artificial Sequence
  Description of Artificial Sequence: targeting sequence/synthetic sequence
SGVSYNSPSVTDPTLIADAL

SEQ ID NO: 7429 - protein, 20 aa, Artificial Sequence
  Description of Artificial Sequence: targeting sequence/synthetic sequence
YSSTRASSVPIIPSVGLEET

SEQ ID NO: 7430 - protein, 20 aa, Artificial Sequence
  Description of Artificial Sequence: targeting sequence/synthetic sequence
LGIVTNSTLKATEIDQLVCR

SEQ ID NO: 7431 - protein, 20 aa, Artificial Sequence
  Description of Artificial Sequence: targeting sequence/synthetic sequence
EADASAPATCAEMRCEFGAR

SEQ ID NO: 7432 - protein, 20 aa, Artificial Sequence
  Description of Artificial Sequence: targeting sequence/synthetic sequence
RDPYHATSGALSPAKDCGSQ

SEQ ID NO: 7433 - protein, 20 aa, Artificial Sequence
  Description of Artificial Sequence: targeting sequence/synthetic sequence
GVSYNSPSVTDPTLIADALD

SEQ ID NO: 7434 - protein, 20 aa, Artificial Sequence
  Description of Artificial Sequence: targeting sequence/synthetic sequence
KAIALCHNVTPVYESNGVTD

SEQ ID NO: 7435 - protein, 20 aa, Artificial Sequence
  Description of Artificial Sequence: targeting sequence/synthetic sequence
AIDTMLDMAENEGVVDIFNC

SEQ ID NO: 7436 - protein, 20 aa, Artificial Sequence
  Description of Artificial Sequence: targeting sequence/synthetic sequence
GELAKHAVSEGTKAVTKYTS

SEQ ID NO: 7437 - protein, 20 aa, Artificial Sequence
  Description of Artificial Sequence: targeting sequence/synthetic sequence
FTYESKRMGIIVRDESTGEI

SEQ ID NO: 7438 - protein, 20 aa, Artificial Sequence
  Description of Artificial Sequence: targeting sequence/synthetic sequence
SPLDAAVECHRGECQAEGVL

SEQ ID NO: 7439 - protein, 20 aa, Artificial Sequence
  Description of Artificial Sequence: targeting sequence/synthetic sequence
RCDQFLPKTDSILSDPTDHL

SEQ ID NO: 7440 - protein, 20 aa, Artificial Sequence
  Description of Artificial Sequence: targeting sequence/synthetic sequence
EIRATSEVSPNSKPSPNTKN

SEQ ID NO: 7441 - protein, 20 aa, Artificial Sequence
  Description of Artificial Sequence: targeting sequence/synthetic sequence
SVTDPSGKSLLLDPPTNIRD

SEQ ID NO: 7442 - protein, 20 aa, Artificial Sequence
  Description of Artificial Sequence: targeting sequence/synthetic sequence
SQSDQLLAESSSARPQLELH

SEQ ID NO: 7443 - protein, 20 aa, Artificial Sequence
  Description of Artificial Sequence: targeting sequence/synthetic sequence
GANGAPGNDGAKGDAGAPGA

SEQ ID NO: 7444 - protein, 20 aa, Artificial Sequence
  Description of Artificial Sequence: targeting sequence/synthetic sequence
EDTNLCAIHAKRVTIMPKDI

SEQ ID NO: 7445 - protein, 20 aa, Artificial Sequence
  Description of Artificial Sequence: targeting sequence/synthetic sequence
RELIDQYDVQRDDSSDGSLE

SEQ ID NO: 7446 - protein, 20 aa, Artificial Sequence
  Description of Artificial Sequence: targeting sequence/synthetic sequence
RSVVSFDKVKEPRKSRDSES

SEQ ID NO: 7447 - protein, 20 aa, Artificial Sequence
  Description of Artificial Sequence: targeting sequence/synthetic sequence
DCMKHFKGSVEKLCSVEQDL

SEQ ID NO: 7448 - protein, 20 aa, Artificial Sequence
  Description of Artificial Sequence: targeting sequence/synthetic sequence
VRGLTGPIGPPGPAGAPGDK

SEQ ID NO: 7449 - protein, 20 aa, Artificial Sequence
  Description of Artificial Sequence: targeting sequence/synthetic sequence
QPSTSRKRPREGEAEGAETT

SEQ ID NO: 7450 - protein, 20 aa, Artificial Sequence
  Description of Artificial Sequence: targeting sequence/synthetic sequence
ETIKNCLSAAEDKKLKSVAF

SEQ ID NO: 7451 - protein, 20 aa, Artificial Sequence
  Description of Artificial Sequence: targeting sequence/synthetic sequence
PDVTERCSDGWSFDATTLDD

SEQ ID NO: 7452 - protein, 20 aa, Artificial Sequence
  Description of Artificial Sequence: targeting sequence/synthetic sequence
QLVCRDKLSSTSQLKSVGLN

SEQ ID NO: 7453 - protein, 20 aa, Artificial Sequence
  Description of Artificial Sequence: targeting sequence/synthetic sequence
CCESASEDCMAKELPEHTVK

SEQ ID NO: 7454 - protein, 20 aa, Artificial Sequence
  Description of Artificial Sequence: targeting sequence/synthetic sequence
QGPSGASGPAGPRGPPGSAG

SEQ ID NO: 7455 - protein, 20 aa, Artificial Sequence
  Description of Artificial Sequence: targeting sequence/synthetic sequence
SNTQRSSEFKIVASDSTESK

SEQ ID NO: 7456 - protein, 20 aa, Artificial Sequence
  Description of Artificial Sequence: targeting sequence/synthetic sequence
ITANTTDEPTTQPTTEPTTQ

SEQ ID NO: 7457 - protein, 20 aa, Artificial Sequence
  Description of Artificial Sequence: targeting sequence/synthetic sequence
PSQSDQLLAESSSARPQLEL

SEQ ID NO: 7458 - protein, 20 aa, Artificial Sequence
  Description of Artificial Sequence: targeting sequence/synthetic sequence
EMRQKKLEKVMEEEGLKDEE

SEQ ID NO: 7459 - protein, 20 aa, Artificial Sequence
  Description of Artificial Sequence: targeting sequence/synthetic sequence
NAQRSSEFKIVASDSTESKS

SEQ ID NO: 7460 - protein, 20 aa, Artificial Sequence
  Description of Artificial Sequence: targeting sequence/synthetic sequence
GIPGVPGAKGEDGKDGSPGE

SEQ ID NO: 7461 - protein, 20 aa, Artificial Sequence
  Description of Artificial Sequence: targeting sequence/synthetic sequence
GVTEEAPLKLSKAVHKAVLT

SEQ ID NO: 7462 - protein, 20 aa, Artificial Sequence
  Description of Artificial Sequence: targeting sequence/synthetic sequence
ISQSKLIARTQGIEDLIDTA

SEQ ID NO: 7463 - protein, 20 aa, Artificial Sequence
  Description of Artificial Sequence: targeting sequence/synthetic sequence
NISVTDPSGKSLLLDPPSNI

SEQ ID NO: 7464 - protein, 20 aa, Artificial Sequence
  Description of Artificial Sequence: targeting sequence/synthetic sequence
GRVADTVGTGPTNSEAIPAL

SEQ ID NO: 7465 - protein, 20 aa, Artificial Sequence
  Description of Artificial Sequence: targeting sequence/synthetic sequence
GSEANLTCTLTGLRDASGAT

SEQ ID NO: 7466 - protein, 20 aa, Artificial Sequence
  Description of Artificial Sequence: targeting sequence/synthetic sequence
FSGPHCEKGLVEKSAGDVDT

SEQ ID NO: 7467 - protein, 20 aa, Artificial Sequence
  Description of Artificial Sequence: targeting sequence/synthetic sequence
PGELAKHAVSEGTKAVTKYT

SEQ ID NO: 7468 - protein, 20 aa, Artificial Sequence
  Description of Artificial Sequence: targeting sequence/synthetic sequence
VVSFDKVKEPRKSRDSESHS

SEQ ID NO: 7469 - protein, 20 aa, Artificial Sequence
  Description of Artificial Sequence: targeting sequence/synthetic sequence
KCCESASEDCMAKELPEHTV

SEQ ID NO: 7470 - protein, 20 aa, Artificial Sequence
  Description of Artificial Sequence: targeting sequence/synthetic sequence
GRVGPPGPSGNAGPPGPPGP

SEQ ID NO: 7471 - protein, 20 aa, Artificial Sequence
  Description of Artificial Sequence: targeting sequence/synthetic sequence
LHLADDCMKHFKGSVEKLCS

SEQ ID NO: 7472 - protein, 20 aa, Artificial Sequence
  Description of Artificial Sequence: targeting sequence/synthetic sequence
SAPLEAPEPRKPVTAQERQR

SEQ ID NO: 7473 - protein, 20 aa, Artificial Sequence
  Description of Artificial Sequence: targeting sequence/synthetic sequence
SVVSFDKVKEPRKSRDSESH

SEQ ID NO: 7474 - protein, 20 aa, Artificial Sequence
  Description of Artificial Sequence: targeting sequence/synthetic sequence
DCNRKRKGSSTDYQESMDTD

SEQ ID NO: 7475 - protein, 20 aa, Artificial Sequence
  Description of Artificial Sequence: targeting sequence/synthetic sequence
VLVPAGSARPVAFSVVPTAA

SEQ ID NO: 7476 - protein, 20 aa, Artificial Sequence
  Description of Artificial Sequence: targeting sequence/synthetic sequence
TPLAATEAQTTRLTATEAQT

SEQ ID NO: 7477 - protein, 20 aa, Artificial Sequence
  Description of Artificial Sequence: targeting sequence/synthetic sequence
DIWGQGTMVTVSSASTKGPS

SEQ ID NO: 7478 - protein, 20 aa, Artificial Sequence
  Description of Artificial Sequence: targeting sequence/synthetic sequence
PSAPLEAPEPRKPVTAQERQ

SEQ ID NO: 7479 - protein, 20 aa, Artificial Sequence
  Description of Artificial Sequence: targeting sequence/synthetic sequence
IHTAEIRATSEVSPNSKPSP

SEQ ID NO: 7480 - protein, 20 aa, Artificial Sequence
  Description of Artificial Sequence: targeting sequence/synthetic sequence
TGTLPAEYPLKPGEKAPKVR

SEQ ID NO: 7481 - protein, 20 aa, Artificial Sequence
  Description of Artificial Sequence: targeting sequence/synthetic sequence
PETPTGDSDPQPAPKKMKTS

SEQ ID NO: 7482 - protein, 20 aa, Artificial Sequence
  Description of Artificial Sequence: targeting sequence/synthetic sequence
PGPSGESRGHSATQLPAEKT

SEQ ID NO: 7483 - protein, 20 aa, Artificial Sequence
  Description of Artificial Sequence: targeting sequence/synthetic sequence
EAPLKLSKAVHKAVLTIDEK

SEQ ID NO: 7484 - protein, 20 aa, Artificial Sequence
  Description of Artificial Sequence: targeting sequence/synthetic sequence
PAEVTTTVLVRRDHHGANFS

SEQ ID NO: 7485 - protein, 20 aa, Artificial Sequence
  Description of Artificial Sequence: targeting sequence/synthetic sequence
PAQRDGGALGRGPWDSSDRS

SEQ ID NO: 7486 - protein, 20 aa, Artificial Sequence
  Description of Artificial Sequence: targeting sequence/synthetic sequence
EPPVKKLMRTSTPPPASVIN

SEQ ID NO: 7487 - protein, 20 aa, Artificial Sequence
  Description of Artificial Sequence: targeting sequence/synthetic sequence
LDRQDPPSVVVTSHQAPGEK

SEQ ID NO: 7488 - protein, 20 aa, Artificial Sequence
  Description of Artificial Sequence: targeting sequence/synthetic sequence
VVYAKCDSSPDSAEDVRKVC

SEQ ID NO: 7489 - protein, 20 aa, Artificial Sequence
  Description of Artificial Sequence: targeting sequence/synthetic sequence
PKSCDTPPPCPRCPAPELLG

SEQ ID NO: 7490 - protein, 20 aa, Artificial Sequence
  Description of Artificial Sequence: targeting sequence/synthetic sequence
IPVRAPRSPRAPEPALEPES

SEQ ID NO: 7491 - protein, 20 aa, Artificial Sequence
  Description of Artificial Sequence: targeting sequence/synthetic sequence
LMISRTPEVTCVVVDVSHED

SEQ ID NO: 7492 - protein, 20 aa, Artificial Sequence
  Description of Artificial Sequence: targeting sequence/synthetic sequence
VHDGSLAPDHLEGRVDFENV

SEQ ID NO: 7493 - protein, 20 aa, Artificial Sequence
  Description of Artificial Sequence: targeting sequence/synthetic sequence
TPSPSTPPTPSPSCCHPRLS

SEQ ID NO: 7494 - protein, 20 aa, Artificial Sequence
  Description of Artificial Sequence: targeting sequence/synthetic sequence
HGLASSNETFDGLDCPAAGR

SEQ ID NO: 7495 - protein, 20 aa, Artificial Sequence
  Description of Artificial Sequence: targeting sequence/synthetic sequence
GPGEDGLNPFLEVKVTDTPK

SEQ ID NO: 7496 - protein, 20 aa, Artificial Sequence
  Description of Artificial Sequence: targeting sequence/synthetic sequence
FGTQTYTCNVDHKPSNTKVD

SEQ ID NO: 7497 - protein, 20 aa, Artificial Sequence
  Description of Artificial Sequence: targeting sequence/synthetic sequence
RYQNLSPVGSGAYGSVCAAF

SEQ ID NO: 7498 - protein, 20 aa, Artificial Sequence
  Description of Artificial Sequence: targeting sequence/synthetic sequence
QQYQSSNTQRSSEFKIVASD

SEQ ID NO: 7499 - protein, 20 aa, Artificial Sequence
  Description of Artificial Sequence: targeting sequence/synthetic sequence
FRSALESSPDPATLSKEDAR

SEQ ID NO: 7500 - protein, 20 aa, Artificial Sequence
  Description of Artificial Sequence: targeting sequence/synthetic sequence
PQGPKGDPGPPGIPGRNGDP

SEQ ID NO: 7501 - protein, 20 aa, Artificial Sequence
  Description of Artificial Sequence: targeting sequence/synthetic sequence
LAESRTTLNKRNDIEKRIEC

SEQ ID NO: 7502 - protein, 20 aa, Artificial Sequence
  Description of Artificial Sequence: targeting sequence/synthetic sequence
ANDTGFVDIPKQEKALMKAV

SEQ ID NO: 7503 - protein, 20 aa, Artificial Sequence
  Description of Artificial Sequence: targeting sequence/synthetic sequence
SYRLAEQQPLLRHPAPPGPG

SEQ ID NO: 7504 - protein, 20 aa, Artificial Sequence
  Description of Artificial Sequence: targeting sequence/synthetic sequence
IPDGGLMLPLREPVVTLEGH

SEQ ID NO: 7505 - protein, 20 aa, Artificial Sequence
  Description of Artificial Sequence: targeting sequence/synthetic sequence
LSKPEVEYDCDAPSHNSEKK

SEQ ID NO: 7506 - protein, 20 aa, Artificial Sequence
  Description of Artificial Sequence: targeting sequence/synthetic sequence
SIFDGLVEEDDKDKAKRVSR

SEQ ID NO: 7507 - protein, 20 aa, Artificial Sequence
  Description of Artificial Sequence: targeting sequence/synthetic sequence
PDTAVAPGPPPGPPRVSPDP

SEQ ID NO: 7508 - protein, 20 aa, Artificial Sequence
  Description of Artificial Sequence: targeting sequence/synthetic sequence
ATASAMAGPSSETTSEEQLI

SEQ ID NO: 7509 - protein, 20 aa, Artificial Sequence
  Description of Artificial Sequence: targeting sequence/synthetic sequence
PAGSARPVAFSVVPTAAAAV

SEQ ID NO: 7510 - protein, 20 aa, Artificial Sequence
  Description of Artificial Sequence: targeting sequence/synthetic sequence
RDTQAAIKGQNPSATFGDVS

SEQ ID NO: 7511 - protein, 20 aa, Artificial Sequence
  Description of Artificial Sequence: targeting sequence/synthetic sequence
NLSLDELPPALRQDNFSLPS

SEQ ID NO: 7512 - protein, 20 aa, Artificial Sequence
  Description of Artificial Sequence: targeting sequence/synthetic sequence
TTTSGGCHSPEDTPKDNAAT

SEQ ID NO: 7513 - protein, 20 aa, Artificial Sequence
  Description of Artificial Sequence: targeting sequence/synthetic sequence
VYAKCDSSPDSAEDVRKVCQ

SEQ ID NO: 7514 - protein, 20 aa, Artificial Sequence
  Description of Artificial Sequence: targeting sequence/synthetic sequence
DSPTQPTTGSFCPGPVTLCS

SEQ ID NO: 7515 - protein, 20 aa, Artificial Sequence
  Description of Artificial Sequence: targeting sequence/synthetic sequence
DGGLMLPLREPVVTLEGHTK

SEQ ID NO: 7516 - protein, 20 aa, Artificial Sequence
  Description of Artificial Sequence: targeting sequence/synthetic sequence
PGPEGGKGAAGPPGPPGAAG

SEQ ID NO: 7517 - protein, 20 aa, Artificial Sequence
  Description of Artificial Sequence: targeting sequence/synthetic sequence
GPSGESRGHSATQLPAEKTV

SEQ ID NO: 7518 - protein, 20 aa, Artificial Sequence
  Description of Artificial Sequence: targeting sequence/synthetic sequence
RAIARVADTMPSGPTNSEAV

SEQ ID NO: 7519 - protein, 20 aa, Artificial Sequence
  Description of Artificial Sequence: targeting sequence/synthetic sequence
VEYDCDAPSHNSEKKKTEGL

SEQ ID NO: 7520 - protein, 20 aa, Artificial Sequence
  Description of Artificial Sequence: targeting sequence/synthetic sequence
AGVAIAKTIRLESEVTAIKN

SEQ ID NO: 7521 - protein, 20 aa, Artificial Sequence
  Description of Artificial Sequence: targeting sequence/synthetic sequence
LLDEDGKKTFFRGLESQTKL

SEQ ID NO: 7522 - protein, 20 aa, Artificial Sequence
  Description of Artificial Sequence: targeting sequence/synthetic sequence
AAGVLCELAQDKEAAEAIEA

SEQ ID NO: 7523 - protein, 20 aa, Artificial Sequence
  Description of Artificial Sequence: targeting sequence/synthetic sequence
VHDFPGKKLVLSSEKTVLTP

SEQ ID NO: 7524 - protein, 20 aa, Artificial Sequence
  Description of Artificial Sequence: targeting sequence/synthetic sequence
SVVYAKCDSSPDSAEDVRKV

SEQ ID NO: 7525 - protein, 20 aa, Artificial Sequence
  Description of Artificial Sequence: targeting sequence/synthetic sequence
CSPSEADDTKALIQPSKCSP

SEQ ID NO: 7526 - protein, 20 aa, Artificial Sequence
  Description of Artificial Sequence: targeting sequence/synthetic sequence
ESSPADPATLSEDEARLLLA

SEQ ID NO: 7527 - protein, 20 aa, Artificial Sequence
  Description of Artificial Sequence: targeting sequence/synthetic sequence
GSPGFQGLPGPAGPPGEAGK

SEQ ID NO: 7528 - protein, 20 aa, Artificial Sequence
  Description of Artificial Sequence: targeting sequence/synthetic sequence
EYKCKVSNKGLPAPIEKTIS

SEQ ID NO: 7529 - protein, 20 aa, Artificial Sequence
  Description of Artificial Sequence: targeting sequence/synthetic sequence
VVQPSVGAAAGPVVPPCPGR

SEQ ID NO: 7530 - protein, 20 aa, Artificial Sequence
  Description of Artificial Sequence: targeting sequence/synthetic sequence
VAMEMKEDINTKKEDMMFHK

SEQ ID NO: 7531 - protein, 20 aa, Artificial Sequence
  Description of Artificial Sequence: targeting sequence/synthetic sequence
RKIAVAAASKPAVEIKQEGD

SEQ ID NO: 7532 - protein, 20 aa, Artificial Sequence
  Description of Artificial Sequence: targeting sequence/synthetic sequence
APSTHPTSASVTVTTPGLLL

SEQ ID NO: 7533 - protein, 20 aa, Artificial Sequence
  Description of Artificial Sequence: targeting sequence/synthetic sequence
IIKGEPGLPGPEGPPGLKGL

SEQ ID NO: 7534 - protein, 20 aa, Artificial Sequence
  Description of Artificial Sequence: targeting sequence/synthetic sequence
QVFSKMEQVSGVLGIEDYSV

SEQ ID NO: 7535 - protein, 20 aa, Artificial Sequence
  Description of Artificial Sequence: targeting sequence/synthetic sequence
NPETTTSGGCHSPEDTPKDN

SEQ ID NO: 7536 - protein, 20 aa, Artificial Sequence
  Description of Artificial Sequence: targeting sequence/synthetic sequence
QHKSHRQMVTTTNPLIRHEN

SEQ ID NO: 7537 - protein, 20 aa, Artificial Sequence
  Description of Artificial Sequence: targeting sequence/synthetic sequence
AAESNRERGQGQEPVGSQEH

SEQ ID NO: 7538 - protein, 20 aa, Artificial Sequence
  Description of Artificial Sequence: targeting sequence/synthetic sequence
HISQSKLIARTQGIEDLIDT

SEQ ID NO: 7539 - protein, 20 aa, Artificial Sequence
  Description of Artificial Sequence: targeting sequence/synthetic sequence
QGVEDSANEDSVDAKPDRSS

SEQ ID NO: 7540 - protein, 20 aa, Artificial Sequence
  Description of Artificial Sequence: targeting sequence/synthetic sequence
FQRAMHDYNQAEMKQRDNCK

SEQ ID NO: 7541 - protein, 20 aa, Artificial Sequence
  Description of Artificial Sequence: targeting sequence/synthetic sequence
TTDEPTTQPTTEPTTQPTIQ

SEQ ID NO: 7542 - protein, 20 aa, Artificial Sequence
  Description of Artificial Sequence: targeting sequence/synthetic sequence
KGQELCADYSENTFTEYKKK

SEQ ID NO: 7543 - protein, 20 aa, Artificial Sequence
  Description of Artificial Sequence: targeting sequence/synthetic sequence
LSPFQDAASSSSSSSSSATT

SEQ ID NO: 7544 - protein, 20 aa, Artificial Sequence
  Description of Artificial Sequence: targeting sequence/synthetic sequence
EETIKNCLSAAEDKKLKSVA

SEQ ID NO: 7545 - protein, 20 aa, Artificial Sequence
  Description of Artificial Sequence: targeting sequence/synthetic sequence
VTEEAPLKLSKAVHKAVLTI

SEQ ID NO: 7546 - protein, 20 aa, Artificial Sequence
  Description of Artificial Sequence: targeting sequence/synthetic sequence
LPEEQDQNYVCKHTYVDRGW

SEQ ID NO: 7547 - protein, 20 aa, Artificial Sequence
  Description of Artificial Sequence: targeting sequence/synthetic sequence
NTAAPATVPSTTAPFFSSST

SEQ ID NO: 7548 - protein, 20 aa, Artificial Sequence
  Description of Artificial Sequence: targeting sequence/synthetic sequence
MKSVIPSDGPSVACVKKASY

SEQ ID NO: 7549 - protein, 20 aa, Artificial Sequence
  Description of Artificial Sequence: targeting sequence/synthetic sequence
TPVIPTAPTSKPSSAGGELL

SEQ ID NO: 7550 - protein, 20 aa, Artificial Sequence
  Description of Artificial Sequence: targeting sequence/synthetic sequence
RLAEQQPLLRHPAPPGPGPG

SEQ ID NO: 7551 - protein, 20 aa, Artificial Sequence
  Description of Artificial Sequence: targeting sequence/synthetic sequence
APGAPGPVGPAGKSGDRGET

SEQ ID NO: 7552 - protein, 20 aa, Artificial Sequence
  Description of Artificial Sequence: targeting sequence/synthetic sequence
DEEPLQFRVPGTSTSATLTG

SEQ ID NO: 7553 - protein, 20 aa, Artificial Sequence
  Description of Artificial Sequence: targeting sequence/synthetic sequence
VYTLPPSQEEMTKNQVSLTC

SEQ ID NO: 7554 - protein, 20 aa, Artificial Sequence
  Description of Artificial Sequence: targeting sequence/synthetic sequence
VKKLMRTSTPPPASVINNML

SEQ ID NO: 7555 - protein, 20 aa, Artificial Sequence
  Description of Artificial Sequence: targeting sequence/synthetic sequence
FVPSADGKACEDIDECSLPN

SEQ ID NO: 7556 - protein, 20 aa, Artificial Sequence
  Description of Artificial Sequence: targeting sequence/synthetic sequence
LAGKSVTCHVKHYTNPSQDV

SEQ ID NO: 7557 - protein, 20 aa, Artificial Sequence
  Description of Artificial Sequence: targeting sequence/synthetic sequence
RVGPPGPSGNAGPPGPPGPA

SEQ ID NO: 7558 - protein, 20 aa, Artificial Sequence
  Description of Artificial Sequence: targeting sequence/synthetic sequence
LKRDIPWPEGEEKLSDNAQS

SEQ ID NO: 7559 - protein, 20 aa, Artificial Sequence
  Description of Artificial Sequence: targeting sequence/synthetic sequence
KSCDKTHTCPPCPAPELLGG

SEQ ID NO: 7560 - protein, 20 aa, Artificial Sequence
  Description of Artificial Sequence: targeting sequence/synthetic sequence
RCEHPPPGPVCGSDGVTYGS

SEQ ID NO: 7561 - protein, 20 aa, Artificial Sequence
  Description of Artificial Sequence: targeting sequence/synthetic sequence
VTTTAGGTAEVAPDAVPRSG

SEQ ID NO: 7562 - protein, 20 aa, Artificial Sequence
  Description of Artificial Sequence: targeting sequence/synthetic sequence
RVADTMPSGPTNSEAVPALT

SEQ ID NO: 7563 - protein, 20 aa, Artificial Sequence
  Description of Artificial Sequence: targeting sequence/synthetic sequence
ALESSPDPATLSKEDARLLL

SEQ ID NO: 7564 - protein, 20 aa, Artificial Sequence
  Description of Artificial Sequence: targeting sequence/synthetic sequence
DFFSSHPLREPVNATEDPSS

SEQ ID NO: 7565 - protein, 20 aa, Artificial Sequence
  Description of Artificial Sequence: targeting sequence/synthetic sequence
DINTKKEDMMFHKIYIQKHD

SEQ ID NO: 7566 - protein, 20 aa, Artificial Sequence
  Description of Artificial Sequence: targeting sequence/synthetic sequence
ARHFESQSDDPHFHEKKQIP

SEQ ID NO: 7567 - protein, 20 aa, Artificial Sequence
  Description of Artificial Sequence: targeting sequence/synthetic sequence
CLAVGMVKEVVRTDSLKGRR

SEQ ID NO: 7568 - protein, 20 aa, Artificial Sequence
  Description of Artificial Sequence: targeting sequence/synthetic sequence
GDLDQNTIETMRKPRCGNPD

SEQ ID NO: 7569 - protein, 20 aa, Artificial Sequence
  Description of Artificial Sequence: targeting sequence/synthetic sequence
EQQPLLRHPAPPGPGPGPGP

SEQ ID NO: 7570 - protein, 20 aa, Artificial Sequence
  Description of Artificial Sequence: targeting sequence/synthetic sequence
WVSSEAYTSPVSRAQSESEV

SEQ ID NO: 7571 - protein, 20 aa, Artificial Sequence
  Description of Artificial Sequence: targeting sequence/synthetic sequence
HAGNLARCSELTQSQASLQS

SEQ ID NO: 7572 - protein, 20 aa, Artificial Sequence
  Description of Artificial Sequence: targeting sequence/synthetic sequence
GPPGPIGNVGAPGAKGARGS

SEQ ID NO: 7573 - protein, 20 aa, Artificial Sequence
  Description of Artificial Sequence: targeting sequence/synthetic sequence
ELTGTLPAEYPLKPGEKAPK

SEQ ID NO: 7574 - protein, 20 aa, Artificial Sequence
  Description of Artificial Sequence: targeting sequence/synthetic sequence
KEDINTKKEDMMFHKIYIQK

SEQ ID NO: 7575 - protein, 20 aa, Artificial Sequence
  Description of Artificial Sequence: targeting sequence/synthetic sequence
YMDVWGKGTTVTVSSASPTS

SEQ ID NO: 7576 - protein, 20 aa, Artificial Sequence
  Description of Artificial Sequence: targeting sequence/synthetic sequence
TSEAPSTQDPSTQASTASSP

SEQ ID NO: 7577 - protein, 20 aa, Artificial Sequence
  Description of Artificial Sequence: targeting sequence/synthetic sequence
MVHDGSLAPDHLEGRVDFEN

SEQ ID NO: 7578 - protein, 20 aa, Artificial Sequence
  Description of Artificial Sequence: targeting sequence/synthetic sequence
LGNKNNYLREEECILACRGV

SEQ ID NO: 7579 - protein, 20 aa, Artificial Sequence
  Description of Artificial Sequence: targeting sequence/synthetic sequence
CDKTHTCPPCPAPELLGGPS

SEQ ID NO: 7580 - protein, 20 aa, Artificial Sequence
  Description of Artificial Sequence: targeting sequence/synthetic sequence
ELIDQYDVQRDDSSDGSLED

SEQ ID NO: 7581 - protein, 20 aa, Artificial Sequence
  Description of Artificial Sequence: targeting sequence/synthetic sequence
VVCVDKLTKVYKDDKKLALN

SEQ ID NO: 7582 - protein, 20 aa, Artificial Sequence
  Description of Artificial Sequence: targeting sequence/synthetic sequence
GPPGPPGINGSPGGKGEMGP

SEQ ID NO: 7583 - protein, 20 aa, Artificial Sequence
  Description of Artificial Sequence: targeting sequence/synthetic sequence
SPPDAASAAPLRTITADTFR

SEQ ID NO: 7584 - protein, 20 aa, Artificial Sequence
  Description of Artificial Sequence: targeting sequence/synthetic sequence
QPQEFPTYVEPTNDEICEAF

SEQ ID NO: 7585 - protein, 20 aa, Artificial Sequence
  Description of Artificial Sequence: targeting sequence/synthetic sequence
WQTEEKTCDLVGEKGKESEK

SEQ ID NO: 7586 - protein, 20 aa, Artificial Sequence
  Description of Artificial Sequence: targeting sequence/synthetic sequence
PAGSPGFQGLPGPAGPPGEA

SEQ ID NO: 7587 - protein, 20 aa, Artificial Sequence
  Description of Artificial Sequence: targeting sequence/synthetic sequence
LMATASAMAGPSSETTSEEQ

SEQ ID NO: 7588 - protein, 20 aa, Artificial Sequence
  Description of Artificial Sequence: targeting sequence/synthetic sequence
ERCSDGWSFDATTLDDNGTM

SEQ ID NO: 7589 - protein, 20 aa, Artificial Sequence
  Description of Artificial Sequence: targeting sequence/synthetic sequence
YNISVTDPSGKSLLLDPPSN

SEQ ID NO: 7590 - protein, 20 aa, Artificial Sequence
  Description of Artificial Sequence: targeting sequence/synthetic sequence
LAQPSTSRKRPREGEAEGAE

SEQ ID NO: 7591 - protein, 20 aa, Artificial Sequence
  Description of Artificial Sequence: targeting sequence/synthetic sequence
PCPRCPEPKSCDTPPPCPRC

SEQ ID NO: 7592 - protein, 20 aa, Artificial Sequence
  Description of Artificial Sequence: targeting sequence/synthetic sequence
TAPAETATPAPVEKSPAKKK

SEQ ID NO: 7593 - protein, 20 aa, Artificial Sequence
  Description of Artificial Sequence: targeting sequence/synthetic sequence
PVKKLMRTSTPPPASVINNM

SEQ ID NO: 7594 - protein, 20 aa, Artificial Sequence
  Description of Artificial Sequence: targeting sequence/synthetic sequence
STPPTPSPSTPPTPSPSCCH

SEQ ID NO: 7595 - protein, 20 aa, Artificial Sequence
  Description of Artificial Sequence: targeting sequence/synthetic sequence
PPGPSGNAGPPGPPGPAGKE

SEQ ID NO: 7596 - protein, 20 aa, Artificial Sequence
  Description of Artificial Sequence: targeting sequence/synthetic sequence
SGPRGLPGPPGAPGPQGFQG

SEQ ID NO: 7597 - protein, 20 aa, Artificial Sequence
  Description of Artificial Sequence: targeting sequence/synthetic sequence
AKKDFFSSHPLREPVNATED

SEQ ID NO: 7598 - protein, 20 aa, Artificial Sequence
  Description of Artificial Sequence: targeting sequence/synthetic sequence
AIVDVHFDPTTAFRAPDVAR

SEQ ID NO: 7599 - protein, 20 aa, Artificial Sequence
  Description of Artificial Sequence: targeting sequence/synthetic sequence
AFGHALERGRDYEKNKVCKE

SEQ ID NO: 7600 - protein, 20 aa, Artificial Sequence
  Description of Artificial Sequence: targeting sequence/synthetic sequence
VAPSTHPTSASVTVTTPGLL

SEQ ID NO: 7601 - protein, 20 aa, Artificial Sequence
  Description of Artificial Sequence: targeting sequence/synthetic sequence
NNVPCSPKVDFTLSSERDFA

SEQ ID NO: 7602 - protein, 20 aa, Artificial Sequence
  Description of Artificial Sequence: targeting sequence/synthetic sequence
VPEAQEDVEATFPVHQPGNY

SEQ ID NO: 7603 - protein, 20 aa, Artificial Sequence
  Description of Artificial Sequence: targeting sequence/synthetic sequence
LQNNEAGRRAVYKMADVACK

SEQ ID NO: 7604 - protein, 20 aa, Artificial Sequence
  Description of Artificial Sequence: targeting sequence/synthetic sequence
TYESKRMGIIVRDESTGEIT

SEQ ID NO: 7605 - protein, 20 aa, Artificial Sequence
  Description of Artificial Sequence: targeting sequence/synthetic sequence
QQPLLRHPAPPGPGPGPGPG

SEQ ID NO: 7606 - protein, 20 aa, Artificial Sequence
  Description of Artificial Sequence: targeting sequence/synthetic sequence
GLDGAKGDAGPAGPKGEPGS

SEQ ID NO: 7607 - protein, 20 aa, Artificial Sequence
  Description of Artificial Sequence: targeting sequence/synthetic sequence
FFNDKLAAPLPEIPPDVVTE

SEQ ID NO: 7608 - protein, 20 aa, Artificial Sequence
  Description of Artificial Sequence: targeting sequence/synthetic sequence
YTLPPSQEEMTKNQVSLTCL

SEQ ID NO: 7609 - protein, 20 aa, Artificial Sequence
  Description of Artificial Sequence: targeting sequence/synthetic sequence
FVCRDKLSSTSQLKSVGLNL

SEQ ID NO: 7610 - protein, 20 aa, Artificial Sequence
  Description of Artificial Sequence: targeting sequence/synthetic sequence
HLLKRRNVPHEDICEDSDID

SEQ ID NO: 7611 - protein, 20 aa, Artificial Sequence
  Description of Artificial Sequence: targeting sequence/synthetic sequence
SGFGDPLICDNQVSTGDTRI

SEQ ID NO: 7612 - protein, 20 aa, Artificial Sequence
  Description of Artificial Sequence: targeting sequence/synthetic sequence
EGCKKIIGQLQSSLQTGSEE

SEQ ID NO: 7613 - protein, 20 aa, Artificial Sequence
  Description of Artificial Sequence: targeting sequence/synthetic sequence
LEPTDQDFYQKFATGSVPIP

SEQ ID NO: 7614 - protein, 20 aa, Artificial Sequence
  Description of Artificial Sequence: targeting sequence/synthetic sequence
NDVDKLVCRDKLSSTNQLRS

SEQ ID NO: 7615 - protein, 20 aa, Artificial Sequence
  Description of Artificial Sequence: targeting sequence/synthetic sequence
SPSPSPVPKSPSVDKYNVSG

SEQ ID NO: 7616 - protein, 20 aa, Artificial Sequence
  Description of Artificial Sequence: targeting sequence/synthetic sequence
NSMDPGSTPPSCCVPTKLTP

SEQ ID NO: 7617 - protein, 20 aa, Artificial Sequence
  Description of Artificial Sequence: targeting sequence/synthetic sequence
PQQPPKPCDSQPCFHGGTCQ

SEQ ID NO: 7618 - protein, 20 aa, Artificial Sequence
  Description of Artificial Sequence: targeting sequence/synthetic sequence
SFDKVKEPRKSRDSESHSRV

SEQ ID NO: 7619 - protein, 20 aa, Artificial Sequence
  Description of Artificial Sequence: targeting sequence/synthetic sequence
GAMAEAPGPSGESRGHSATQ

SEQ ID NO: 7620 - protein, 20 aa, Artificial Sequence
  Description of Artificial Sequence: targeting sequence/synthetic sequence
ILDRQDPPSVVVTSHQAPGE

SEQ ID NO: 7621 - protein, 20 aa, Artificial Sequence
  Description of Artificial Sequence: targeting sequence/synthetic sequence
EQIADSQHRSYRQMATTTNP

SEQ ID NO: 7622 - protein, 20 aa, Artificial Sequence
  Description of Artificial Sequence: targeting sequence/synthetic sequence
QAKKDFFSSHPLREPVNATE

SEQ ID NO: 7623 - protein, 20 aa, Artificial Sequence
  Description of Artificial Sequence: targeting sequence/synthetic sequence
HLADDCMKHFKGSVEKLCSV

SEQ ID NO: 7624 - protein, 20 aa, Artificial Sequence
  Description of Artificial Sequence: targeting sequence/synthetic sequence
ADLLEKMLELDVDKRLTAAQ

SEQ ID NO: 7625 - protein, 20 aa, Artificial Sequence
  Description of Artificial Sequence: targeting sequence/synthetic sequence
PRCEHPPPGPVCGSDGVTYG

SEQ ID NO: 7626 - protein, 20 aa, Artificial Sequence
  Description of Artificial Sequence: targeting sequence/synthetic sequence
LLQDEFPGIPSPLDAAVECH

SEQ ID NO: 7627 - protein, 20 aa, Artificial Sequence
  Description of Artificial Sequence: targeting sequence/synthetic sequence
PPTPSPSTPPTPSPSCCHPR

SEQ ID NO: 7628 - protein, 20 aa, Artificial Sequence
  Description of Artificial Sequence: targeting sequence/synthetic sequence
LPAPEFSPEPESGRALRLRC

SEQ ID NO: 7629 - protein, 20 aa, Artificial Sequence
  Description of Artificial Sequence: targeting sequence/synthetic sequence
SQSKLIARTQGIEDLIDTAI

SEQ ID NO: 7630 - protein, 20 aa, Artificial Sequence
  Description of Artificial Sequence: targeting sequence/synthetic sequence
GPPGERGGPGSRGFPGADGV

SEQ ID NO: 7631 - protein, 20 aa, Artificial Sequence
  Description of Artificial Sequence: targeting sequence/synthetic sequence
SLKPSICGTAVCKNIPGDFE

SEQ ID NO: 7632 - protein, 20 aa, Artificial Sequence
  Description of Artificial Sequence: targeting sequence/synthetic sequence
QEFPTYVEPTNDEICEAFRK

SEQ ID NO: 7633 - protein, 20 aa, Artificial Sequence
  Description of Artificial Sequence: targeting sequence/synthetic sequence
DLNLCGLTEDPDLQVSAMQH

SEQ ID NO: 7634 - protein, 20 aa, Artificial Sequence
  Description of Artificial Sequence: targeting sequence/synthetic sequence
VIDLTIESSSDEEEDPPAKR

SEQ ID NO: 7635 - protein, 20 aa, Artificial Sequence
  Description of Artificial Sequence: targeting sequence/synthetic sequence
LVGVGGGDVEDVTPRPGGCQ

SEQ ID NO: 7636 - protein, 20 aa, Artificial Sequence
  Description of Artificial Sequence: targeting sequence/synthetic sequence
FGHALERGRDYEKNKVCKEF

SEQ ID NO: 7637 - protein, 20 aa, Artificial Sequence
  Description of Artificial Sequence: targeting sequence/synthetic sequence
DHKPSNTKVDKRVESKYGPP

SEQ ID NO: 7638 - protein, 20 aa, Artificial Sequence
  Description of Artificial Sequence: targeting sequence/synthetic sequence
RSGQVLEVSGSKAVVQVFEG

SEQ ID NO: 7639 - protein, 20 aa, Artificial Sequence
  Description of Artificial Sequence: targeting sequence/synthetic sequence
GDAGPPGPAGPAGPPGPIGN

SEQ ID NO: 7640 - protein, 20 aa, Artificial Sequence
  Description of Artificial Sequence: targeting sequence/synthetic sequence
SEIIDSSTRRMESERSPLYR

SEQ ID NO: 7641 - protein, 20 aa, Artificial Sequence
  Description of Artificial Sequence: targeting sequence/synthetic sequence
QKKLEKVMEEEGLKDEEKRL

SEQ ID NO: 7642 - protein, 20 aa, Artificial Sequence
  Description of Artificial Sequence: targeting sequence/synthetic sequence
VQTNGETEPAPLETKPPPSG

SEQ ID NO: 7643 - protein, 20 aa, Artificial Sequence
  Description of Artificial Sequence: targeting sequence/synthetic sequence
LDPISPGDLTMVITQDCDSC

SEQ ID NO: 7644 - protein, 20 aa, Artificial Sequence
  Description of Artificial Sequence: targeting sequence/synthetic sequence
ALNLSLDELPPALRQDNFSL

SEQ ID NO: 7645 - protein, 20 aa, Artificial Sequence
  Description of Artificial Sequence: targeting sequence/synthetic sequence
RTSEKNGSCFLRTDQLDGET

SEQ ID NO: 7646 - protein, 20 aa, Artificial Sequence
  Description of Artificial Sequence: targeting sequence/synthetic sequence
CDVEDSTTCFNAKGPLLKKE

SEQ ID NO: 7647 - protein, 20 aa, Artificial Sequence
  Description of Artificial Sequence: targeting sequence/synthetic sequence
LAEERQIGTVCKRDQSDRGW

SEQ ID NO: 7648 - protein, 20 aa, Artificial Sequence
  Description of Artificial Sequence: targeting sequence/synthetic sequence
QLLAESSSARPQLELHLRPQ

SEQ ID NO: 7649 - protein, 20 aa, Artificial Sequence
  Description of Artificial Sequence: targeting sequence/synthetic sequence
SGAMAEAPGPSGESRGHSAT

SEQ ID NO: 7650 - protein, 20 aa, Artificial Sequence
  Description of Artificial Sequence: targeting sequence/synthetic sequence
LMNSMDPGSTPPSCCVPTKL

SEQ ID NO: 7651 - protein, 20 aa, Artificial Sequence
  Description of Artificial Sequence: targeting sequence/synthetic sequence
PPVKKLMRTSTPPPASVINN

SEQ ID NO: 7652 - protein, 20 aa, Artificial Sequence
  Description of Artificial Sequence: targeting sequence/synthetic sequence
PGIAGPRGSPGERGETGPPG

SEQ ID NO: 7653 - protein, 20 aa, Artificial Sequence
  Description of Artificial Sequence: targeting sequence/synthetic sequence
SDLVFHMRSHHKKEHAGPDP

SEQ ID NO: 7654 - protein, 20 aa, Artificial Sequence
  Description of Artificial Sequence: targeting sequence/synthetic sequence
ILSDETLPAPEFSPEPESGR

SEQ ID NO: 7655 - protein, 20 aa, Artificial Sequence
  Description of Artificial Sequence: targeting sequence/synthetic sequence
ALLRGVQCQAQLVESGGGVV

SEQ ID NO: 7656 - protein, 20 aa, Artificial Sequence
  Description of Artificial Sequence: targeting sequence/synthetic sequence
PPKPCDSQPCFHGGTCQDWA

SEQ ID NO: 7657 - protein, 20 aa, Artificial Sequence
  Description of Artificial Sequence: targeting sequence/synthetic sequence
SPSSPPHSTGSVRPVRAQGE

SEQ ID NO: 7658 - protein, 20 aa, Artificial Sequence
  Description of Artificial Sequence: targeting sequence/synthetic sequence
GAPGPVGPAGKSGDRGETGP

SEQ ID NO: 7659 - protein, 20 aa, Artificial Sequence
  Description of Artificial Sequence: targeting sequence/synthetic sequence
ESWQTEEKTCDLVGEKGKES

SEQ ID NO: 7660 - protein, 20 aa, Artificial Sequence
  Description of Artificial Sequence: targeting sequence/synthetic sequence
DPGSTPPSCCVPTKLTPISI

SEQ ID NO: 7661 - protein, 20 aa, Artificial Sequence
  Description of Artificial Sequence: targeting sequence/synthetic sequence
ATCAEMRCEFGARCVEESGS

SEQ ID NO: 7662 - protein, 20 aa, Artificial Sequence
  Description of Artificial Sequence: targeting sequence/synthetic sequence
DGKFSVVYAKCDSSPDSAED

SEQ ID NO: 7663 - protein, 20 aa, Artificial Sequence
  Description of Artificial Sequence: targeting sequence/synthetic sequence
SGESRGHSATQLPAEKTVGG

SEQ ID NO: 7664 - protein, 20 aa, Artificial Sequence
  Description of Artificial Sequence: targeting sequence/synthetic sequence
GPIGEKGSRGDPGTPGVPGK

SEQ ID NO: 7665 - protein, 20 aa, Artificial Sequence
  Description of Artificial Sequence: targeting sequence/synthetic sequence
EMKEDINTKKEDMMFHKIYI

SEQ ID NO: 7666 - protein, 20 aa, Artificial Sequence
  Description of Artificial Sequence: targeting sequence/synthetic sequence
CGSDGVTYSTECELKKARCE

SEQ ID NO: 7667 - protein, 20 aa, Artificial Sequence
  Description of Artificial Sequence: targeting sequence/synthetic sequence
LKLDGKFSVVYAKCDSSPDS

SEQ ID NO: 7668 - protein, 20 aa, Artificial Sequence
  Description of Artificial Sequence: targeting sequence/synthetic sequence
FHRYGTTVNCIVEEVDARSV

SEQ ID NO: 7669 - protein, 20 aa, Artificial Sequence
  Description of Artificial Sequence: targeting sequence/synthetic sequence
ANGCAQLINQLEPALKTGSE

SEQ ID NO: 7670 - protein, 20 aa, Artificial Sequence
  Description of Artificial Sequence: targeting sequence/synthetic sequence
NRGDSTFESKSYKMADEAGS

SEQ ID NO: 7671 - protein, 20 aa, Artificial Sequence
  Description of Artificial Sequence: targeting sequence/synthetic sequence
PLGVVTNSTLEVTEIDQLVC

SEQ ID NO: 7672 - protein, 20 aa, Artificial Sequence
  Description of Artificial Sequence: targeting sequence/synthetic sequence
LPRKSSIVKRPRSAELSEDD

SEQ ID NO: 7673 - protein, 20 aa, Artificial Sequence
  Description of Artificial Sequence: targeting sequence/synthetic sequence
QVLEVSGSKAVVQVFEGTSG

SEQ ID NO: 7674 - protein, 20 aa, Artificial Sequence
  Description of Artificial Sequence: targeting sequence/synthetic sequence
PGGPPGPKGNSGEPGAPGSK

SEQ ID NO: 7675 - protein, 20 aa, Artificial Sequence
  Description of Artificial Sequence: targeting sequence/synthetic sequence
VRPGTQALEPGAATEAEGFP

SEQ ID NO: 7676 - protein, 20 aa, Artificial Sequence
  Description of Artificial Sequence: targeting sequence/synthetic sequence
CLAESRTTLNKRNDIEKRIE

SEQ ID NO: 7677 - protein, 20 aa, Artificial Sequence
  Description of Artificial Sequence: targeting sequence/synthetic sequence
IPKEEKDPGMGAMGGMGGGM

SEQ ID NO: 7678 - protein, 20 aa, Artificial Sequence
  Description of Artificial Sequence: targeting sequence/synthetic sequence
LRDGPSAPLEAPEPRKPVTA

SEQ ID NO: 7679 - protein, 20 aa, Artificial Sequence
  Description of Artificial Sequence: targeting sequence/synthetic sequence
CHLMATASAMAGPSSETTSE

SEQ ID NO: 7680 - protein, 20 aa, Artificial Sequence
  Description of Artificial Sequence: targeting sequence/synthetic sequence
QASSVPTAQPQAEGSLAKAT

SEQ ID NO: 7681 - protein, 20 aa, Artificial Sequence
  Description of Artificial Sequence: targeting sequence/synthetic sequence
AQASSVPTAQPQAEGSLAKA

SEQ ID NO: 7682 - protein, 20 aa, Artificial Sequence
  Description of Artificial Sequence: targeting sequence/synthetic sequence
AFHRYGTTVNCIVEEVDARS

SEQ ID NO: 7683 - protein, 20 aa, Artificial Sequence
  Description of Artificial Sequence: targeting sequence/synthetic sequence
GSDGQPGPPGPPGTAGFPGS

SEQ ID NO: 7684 - protein, 20 aa, Artificial Sequence
  Description of Artificial Sequence: targeting sequence/synthetic sequence
TGKDCQDIANKGAKQSGLYF

SEQ ID NO: 7685 - protein, 20 aa, Artificial Sequence
  Description of Artificial Sequence: targeting sequence/synthetic sequence
LAKHAVSEGTKAVTKYTSSK

SEQ ID NO: 7686 - protein, 20 aa, Artificial Sequence
  Description of Artificial Sequence: targeting sequence/synthetic sequence
QRAMHDYNQAEMKQRDNCKI

SEQ ID NO: 7687 - protein, 20 aa, Artificial Sequence
  Description of Artificial Sequence: targeting sequence/synthetic sequence
TLVEEQDANFVCRRTFVDRG

SEQ ID NO: 7688 - protein, 20 aa, Artificial Sequence
  Description of Artificial Sequence: targeting sequence/synthetic sequence
LDRFFNDKLAAPLPEIPPDV

SEQ ID NO: 7689 - protein, 20 aa, Artificial Sequence
  Description of Artificial Sequence: targeting sequence/synthetic sequence
ILEGVQCEVQLMESAGGLVK

SEQ ID NO: 7690 - protein, 20 aa, Artificial Sequence
  Description of Artificial Sequence: targeting sequence/synthetic sequence
IDKGQELCADYSENTFTEYK

SEQ ID NO: 7691 - protein, 20 aa, Artificial Sequence
  Description of Artificial Sequence: targeting sequence/synthetic sequence
PPGPPRVSPDPRAELDSTVL

SEQ ID NO: 7692 - protein, 20 aa, Artificial Sequence
  Description of Artificial Sequence: targeting sequence/synthetic sequence
SWTLSPFQDAASSSSSSSSS

SEQ ID NO: 7693 - protein, 20 aa, Artificial Sequence
  Description of Artificial Sequence: targeting sequence/synthetic sequence
MTVFREPTAISAMELSTKQQ

SEQ ID NO: 7694 - protein, 20 aa, Artificial Sequence
  Description of Artificial Sequence: targeting sequence/synthetic sequence
ARVADTMPSGPTNSEAVPAL

SEQ ID NO: 7695 - protein, 20 aa, Artificial Sequence
  Description of Artificial Sequence: targeting sequence/synthetic sequence
GNDGARGSDGQPGPPGPPGT

SEQ ID NO: 7696 - protein, 20 aa, Artificial Sequence
  Description of Artificial Sequence: targeting sequence/synthetic sequence
PGPGEDGLNPFLEVKVTDTP

SEQ ID NO: 7697 - protein, 20 aa, Artificial Sequence
  Description of Artificial Sequence: targeting sequence/synthetic sequence
KDGVRGLTGPIGPPGPAGAP

SEQ ID NO: 7698 - protein, 20 aa, Artificial Sequence
  Description of Artificial Sequence: targeting sequence/synthetic sequence
VNHKPSNTKVDKKVEPKSCD

SEQ ID NO: 7699 - protein, 20 aa, Artificial Sequence
  Description of Artificial Sequence: targeting sequence/synthetic sequence
TWASKINYSQCEPILDDKQR

SEQ ID NO: 7700 - protein, 20 aa, Artificial Sequence
  Description of Artificial Sequence: targeting sequence/synthetic sequence
FPFTSESKRMGVIVRDESTA

SEQ ID NO: 7701 - protein, 20 aa, Artificial Sequence
  Description of Artificial Sequence: targeting sequence/synthetic sequence
DFCRMPPPCSDSCDFDDPRL

SEQ ID NO: 7702 - protein, 20 aa, Artificial Sequence
  Description of Artificial Sequence: targeting sequence/synthetic sequence
LCPNTAPLPQLVTEALQTGT

SEQ ID NO: 7703 - protein, 20 aa, Artificial Sequence
  Description of Artificial Sequence: targeting sequence/synthetic sequence
NRNVNPVALPRAQEGLRPGT

SEQ ID NO: 7704 - protein, 20 aa, Artificial Sequence
  Description of Artificial Sequence: targeting sequence/synthetic sequence
MATASAMAGPSSETTSEEQL

SEQ ID NO: 7705 - protein, 20 aa, Artificial Sequence
  Description of Artificial Sequence: targeting sequence/synthetic sequence
ASSNETFDGLDCPAAGRVAL

SEQ ID NO: 7706 - protein, 20 aa, Artificial Sequence
  Description of Artificial Sequence: targeting sequence/synthetic sequence
MGMLPKPQEQDEKDNTKRFL

SEQ ID NO: 7707 - protein, 20 aa, Artificial Sequence
  Description of Artificial Sequence: targeting sequence/synthetic sequence
AGSKVLILDEPTSGMDAISR

SEQ ID NO: 7708 - protein, 20 aa, Artificial Sequence
  Description of Artificial Sequence: targeting sequence/synthetic sequence
TCEQIADSQHQSHRQMVTTT

SEQ ID NO: 7709 - protein, 20 aa, Artificial Sequence
  Description of Artificial Sequence: targeting sequence/synthetic sequence
LSCKSSCSLGCDLPETHSLD

SEQ ID NO: 7710 - protein, 20 aa, Artificial Sequence
  Description of Artificial Sequence: targeting sequence/synthetic sequence
MFLPRDDLSPARDLLDVPSR

SEQ ID NO: 7711 - protein, 20 aa, Artificial Sequence
  Description of Artificial Sequence: targeting sequence/synthetic sequence
EAQTTQPTGLEAQTTAPAAM

SEQ ID NO: 7712 - protein, 20 aa, Artificial Sequence
  Description of Artificial Sequence: targeting sequence/synthetic sequence
AMEMKEDINTKKEDMMFHKI

SEQ ID NO: 7713 - protein, 20 aa, Artificial Sequence
  Description of Artificial Sequence: targeting sequence/synthetic sequence
CEAAKKTKADDRGTDEKTSE

SEQ ID NO: 7714 - protein, 20 aa, Artificial Sequence
  Description of Artificial Sequence: targeting sequence/synthetic sequence
LAGNPAKHDLDIKPTVISHR

SEQ ID NO: 7715 - protein, 20 aa, Artificial Sequence
  Description of Artificial Sequence: targeting sequence/synthetic sequence
QSHRQMVTTTNPLIRHENRM

SEQ ID NO: 7716 - protein, 20 aa, Artificial Sequence
  Description of Artificial Sequence: targeting sequence/synthetic sequence
SAPATCAEMRCEFGARCVEE

SEQ ID NO: 7717 - protein, 20 aa, Artificial Sequence
  Description of Artificial Sequence: targeting sequence/synthetic sequence
CSDSEEEMKALEADFLTNMH

SEQ ID NO: 7718 - protein, 20 aa, Artificial Sequence
  Description of Artificial Sequence: targeting sequence/synthetic sequence
VTTDPPPDVHVSRVGGLEDQ

SEQ ID NO: 7719 - protein, 20 aa, Artificial Sequence
  Description of Artificial Sequence: targeting sequence/synthetic sequence
DLLTKTQELGRDYRTCLTIV

SEQ ID NO: 7720 - protein, 20 aa, Artificial Sequence
  Description of Artificial Sequence: targeting sequence/synthetic sequence
PFTYESKRMGIIVRDESTGE

SEQ ID NO: 7721 - protein, 20 aa, Artificial Sequence
  Description of Artificial Sequence: targeting sequence/synthetic sequence
GLLDEDGKKTFFRGLESQTK

SEQ ID NO: 7722 - protein, 20 aa, Artificial Sequence
  Description of Artificial Sequence: targeting sequence/synthetic sequence
TMKLCKDTEDIEQTANIQGD

SEQ ID NO: 7723 - protein, 20 aa, Artificial Sequence
  Description of Artificial Sequence: targeting sequence/synthetic sequence
DVDKLVCRDKLSSTNQLRSV

SEQ ID NO: 7724 - protein, 20 aa, Artificial Sequence
  Description of Artificial Sequence: targeting sequence/synthetic sequence
PPGPGPGPGPGPGPGADMQR

SEQ ID NO: 7725 - protein, 20 aa, Artificial Sequence
  Description of Artificial Sequence: targeting sequence/synthetic sequence
PGPGPGPGPGPGADMQRSYD

SEQ ID NO: 7726 - protein, 20 aa, Artificial Sequence
  Description of Artificial Sequence: targeting sequence/synthetic sequence
DCHLAQVPSHTVVARSMGGK

SEQ ID NO: 7727 - protein, 20 aa, Artificial Sequence
  Description of Artificial Sequence: targeting sequence/synthetic sequence
TPPTPSPSTPPTPSPSCCHP

SEQ ID NO: 7728 - protein, 20 aa, Artificial Sequence
  Description of Artificial Sequence: targeting sequence/synthetic sequence
IIFGPGPVLNENETIDIGIQ

SEQ ID NO: 7729 - protein, 20 aa, Artificial Sequence
  Description of Artificial Sequence: targeting sequence/synthetic sequence
EPGPQGHAGAQGPPGPPGIN

SEQ ID NO: 7730 - protein, 20 aa, Artificial Sequence
  Description of Artificial Sequence: targeting sequence/synthetic sequence
VSGDYGHPVYIVQEMPPQSP

SEQ ID NO: 7731 - protein, 20 aa, Artificial Sequence
  Description of Artificial Sequence: targeting sequence/synthetic sequence
TQPTTQLPTDSPTQPTTGSF

SEQ ID NO: 7732 - protein, 20 aa, Artificial Sequence
  Description of Artificial Sequence: targeting sequence/synthetic sequence
SVLNWQDCEVPSPQSCSPEP

SEQ ID NO: 7733 - protein, 20 aa, Artificial Sequence
  Description of Artificial Sequence: targeting sequence/synthetic sequence
QRDGGALGRGPWDSSDRSAL

SEQ ID NO: 7734 - protein, 20 aa, Artificial Sequence
  Description of Artificial Sequence: targeting sequence/synthetic sequence
TGDKQETAINIGYSCRLVSQ

SEQ ID NO: 7735 - protein, 20 aa, Artificial Sequence
  Description of Artificial Sequence: targeting sequence/synthetic sequence
TEGCKKIIGQLQSSLQTGSE

SEQ ID NO: 7736 - protein, 20 aa, Artificial Sequence
  Description of Artificial Sequence: targeting sequence/synthetic sequence
RPAPSPGLGPGPECFTANGA

SEQ ID NO: 7737 - protein, 20 aa, Artificial Sequence
  Description of Artificial Sequence: targeting sequence/synthetic sequence
EPAPLETKPPPSGPQPTSQA

SEQ ID NO: 7738 - protein, 20 aa, Artificial Sequence
  Description of Artificial Sequence: targeting sequence/synthetic sequence
SAHAGADDVVDSSKSFVMEN

SEQ ID NO: 7739 - protein, 20 aa, Artificial Sequence
  Description of Artificial Sequence: targeting sequence/synthetic sequence
CPRCPEPKSCDTPPPCPRCP

SEQ ID NO: 7740 - protein, 20 aa, Artificial Sequence
  Description of Artificial Sequence: targeting sequence/synthetic sequence
SGIPVKVSATVSSPGSVPEV

SEQ ID NO: 7741 - protein, 20 aa, Artificial Sequence
  Description of Artificial Sequence: targeting sequence/synthetic sequence
LPQAKKDFFSSHPLREPVNA

SEQ ID NO: 7742 - protein, 20 aa, Artificial Sequence
  Description of Artificial Sequence: targeting sequence/synthetic sequence
EEPPRFIKEPKDQIGVSGGV

SEQ ID NO: 7743 - protein, 20 aa, Artificial Sequence
  Description of Artificial Sequence: targeting sequence/synthetic sequence
FCQTASGQDGSGPFLADFNG

SEQ ID NO: 7744 - protein, 20 aa, Artificial Sequence
  Description of Artificial Sequence: targeting sequence/synthetic sequence
GPDGLPGSMGPPGTPSVDHG

SEQ ID NO: 7745 - protein, 20 aa, Artificial Sequence
  Description of Artificial Sequence: targeting sequence/synthetic sequence
SALESSPDPATLSKEDARLL

SEQ ID NO: 7746 - protein, 20 aa, Artificial Sequence
  Description of Artificial Sequence: targeting sequence/synthetic sequence
AESNRERGQGQEPVGSQEHA

SEQ ID NO: 7747 - protein, 20 aa, Artificial Sequence
  Description of Artificial Sequence: targeting sequence/synthetic sequence
PSGKSLLLDPPTNIRDYPKC

SEQ ID NO: 7748 - protein, 20 aa, Artificial Sequence
  Description of Artificial Sequence: targeting sequence/synthetic sequence
LGVVTNSTLEVTEIDQLVCK

SEQ ID NO: 7749 - protein, 20 aa, Artificial Sequence
  Description of Artificial Sequence: targeting sequence/synthetic sequence
EGRCERMGEADETMWGTKWC

SEQ ID NO: 7750 - protein, 20 aa, Artificial Sequence
  Description of Artificial Sequence: targeting sequence/synthetic sequence
DVVTTDPPPDVHVSRVGGLE

SEQ ID NO: 7751 - protein, 20 aa, Artificial Sequence
  Description of Artificial Sequence: targeting sequence/synthetic sequence
CALGGSLGSLPASPFRIPED

SEQ ID NO: 7752 - protein, 20 aa, Artificial Sequence
  Description of Artificial Sequence: targeting sequence/synthetic sequence
ELSQPTLTIQTHPYRTCDPV

SEQ ID NO: 7753 - protein, 20 aa, Artificial Sequence
  Description of Artificial Sequence: targeting sequence/synthetic sequence
EGCGLPPKALHTATFQALQR

SEQ ID NO: 7754 - protein, 20 aa, Artificial Sequence
  Description of Artificial Sequence: targeting sequence/synthetic sequence
PGPAGPPGEAGKPGEQGVPG

SEQ ID NO: 7755 - protein, 20 aa, Artificial Sequence
  Description of Artificial Sequence: targeting sequence/synthetic sequence
PPGPQGPPGLQGPSGAADKA

SEQ ID NO: 7756 - protein, 20 aa, Artificial Sequence
  Description of Artificial Sequence: targeting sequence/synthetic sequence
GQGTMVTVSSASTKGPSVFP

SEQ ID NO: 7757 - protein, 20 aa, Artificial Sequence
  Description of Artificial Sequence: targeting sequence/synthetic sequence
VIGKGTHCNQVEVIATLKDG

SEQ ID NO: 7758 - protein, 20 aa, Artificial Sequence
  Description of Artificial Sequence: targeting sequence/synthetic sequence
DSWGRGTLVTVSSASTKGPS

SEQ ID NO: 7759 - protein, 20 aa, Artificial Sequence
  Description of Artificial Sequence: targeting sequence/synthetic sequence
DHMKSVIPSDGPSVACVKKA

SEQ ID NO: 7760 - protein, 20 aa, Artificial Sequence
  Description of Artificial Sequence: targeting sequence/synthetic sequence
RRCAPLSAPTSAAASPLSAA

SEQ ID NO: 7761 - protein, 20 aa, Artificial Sequence
  Description of Artificial Sequence: targeting sequence/synthetic sequence
ADAAPDLFDFLDSSVTTART

SEQ ID NO: 7762 - protein, 20 aa, Artificial Sequence
  Description of Artificial Sequence: targeting sequence/synthetic sequence
KGPCDRCGQCRFGALCEAET

SEQ ID NO: 7763 - protein, 20 aa, Artificial Sequence
  Description of Artificial Sequence: targeting sequence/synthetic sequence
MSEEGNEEWECKRSYSDRGW

SEQ ID NO: 7764 - protein, 20 aa, Artificial Sequence
  Description of Artificial Sequence: targeting sequence/synthetic sequence
QILGQLQPSLQTGSEECRSL

SEQ ID NO: 7765 - protein, 20 aa, Artificial Sequence
  Description of Artificial Sequence: targeting sequence/synthetic sequence
PKSCDTPPPCPRCPEPKSCD

SEQ ID NO: 7766 - protein, 20 aa, Artificial Sequence
  Description of Artificial Sequence: targeting sequence/synthetic sequence
AKCDSSPDSAEDVRKVCQDC

SEQ ID NO: 7767 - protein, 20 aa, Artificial Sequence
  Description of Artificial Sequence: targeting sequence/synthetic sequence
HSDYKVKGLCDSNLISMDIT

SEQ ID NO: 7768 - protein, 20 aa, Artificial Sequence
  Description of Artificial Sequence: targeting sequence/synthetic sequence
EVPQTRLPLTYPAPNGDPIL

SEQ ID NO: 7769 - protein, 20 aa, Artificial Sequence
  Description of Artificial Sequence: targeting sequence/synthetic sequence
GQRDRKAEHWKHKKEESGRE

SEQ ID NO: 7770 - protein, 20 aa, Artificial Sequence
  Description of Artificial Sequence: targeting sequence/synthetic sequence
VFEPSEAEISHTQKATLVCL

SEQ ID NO: 7771 - protein, 20 aa, Artificial Sequence
  Description of Artificial Sequence: targeting sequence/synthetic sequence
CGSDGVTYGNECQLKTIACR

SEQ ID NO: 7772 - protein, 20 aa, Artificial Sequence
  Description of Artificial Sequence: targeting sequence/synthetic sequence
PSWTLSPFQDAASSSSSSSS

SEQ ID NO: 7773 - protein, 20 aa, Artificial Sequence
  Description of Artificial Sequence: targeting sequence/synthetic sequence
QLEMLENQIATIHQSCPSQE

SEQ ID NO: 7774 - protein, 20 aa, Artificial Sequence
  Description of Artificial Sequence: targeting sequence/synthetic sequence
EELSAKKRKKSSSEALFKSF

SEQ ID NO: 7775 - protein, 20 aa, Artificial Sequence
  Description of Artificial Sequence: targeting sequence/synthetic sequence
PEFSPEPESGRALRLRCLAP

SEQ ID NO: 7776 - protein, 20 aa, Artificial Sequence
  Description of Artificial Sequence: targeting sequence/synthetic sequence
PSCALAALPKDVPNSQPEMV

SEQ ID NO: 7777 - protein, 20 aa, Artificial Sequence
  Description of Artificial Sequence: targeting sequence/synthetic sequence
QRRRDPYHATSGALSPAKDC

SEQ ID NO: 7778 - protein, 20 aa, Artificial Sequence
  Description of Artificial Sequence: targeting sequence/synthetic sequence
QAGIPVRAPRSPRAPEPALE

SEQ ID NO: 7779 - protein, 20 aa, Artificial Sequence
  Description of Artificial Sequence: targeting sequence/synthetic sequence
QQPPKPCDSQPCFHGGTCQD

SEQ ID NO: 7780 - protein, 20 aa, Artificial Sequence
  Description of Artificial Sequence: targeting sequence/synthetic sequence
QTGDLDQNTIETMRKPRCGN

SEQ ID NO: 7781 - protein, 20 aa, Artificial Sequence
  Description of Artificial Sequence: targeting sequence/synthetic sequence
ICKKDSLDKEKEKHIDREFV

SEQ ID NO: 7782 - protein, 20 aa, Artificial Sequence
  Description of Artificial Sequence: targeting sequence/synthetic sequence
TLSCENKIISFKEMNPPDNI

SEQ ID NO: 7783 - protein, 20 aa, Artificial Sequence
  Description of Artificial Sequence: targeting sequence/synthetic sequence
PSATKRWGFRSGVPPKVVSY

SEQ ID NO: 7784 - protein, 20 aa, Artificial Sequence
  Description of Artificial Sequence: targeting sequence/synthetic sequence
GRQGPQGEKGEAGPPGPPGI

SEQ ID NO: 7785 - protein, 20 aa, Artificial Sequence
  Description of Artificial Sequence: targeting sequence/synthetic sequence
EAVLPEEQDQNYVCKHTYVD

SEQ ID NO: 7786 - protein, 20 aa, Artificial Sequence
  Description of Artificial Sequence: targeting sequence/synthetic sequence
GEPGAPGSKGDTGAKGEPGP

SEQ ID NO: 7787 - protein, 20 aa, Artificial Sequence
  Description of Artificial Sequence: targeting sequence/synthetic sequence
SDADRKGGNSSVKLEAGLAN

SEQ ID NO: 7788 - protein, 20 aa, Artificial Sequence
  Description of Artificial Sequence: targeting sequence/synthetic sequence
PESRKLEKSEDEPPLTLPKP

SEQ ID NO: 7789 - protein, 20 aa, Artificial Sequence
  Description of Artificial Sequence: targeting sequence/synthetic sequence
QTNGETEPAPLETKPPPSGP

SEQ ID NO: 7790 - protein, 20 aa, Artificial Sequence
  Description of Artificial Sequence: targeting sequence/synthetic sequence
GPGGDKGDTGPPGPQGLQGL

SEQ ID NO: 7791 - protein, 20 aa, Artificial Sequence
  Description of Artificial Sequence: targeting sequence/synthetic sequence
LSDETLPAPEFSPEPESGRA

SEQ ID NO: 7792 - protein, 20 aa, Artificial Sequence
  Description of Artificial Sequence: targeting sequence/synthetic sequence
TPPNATEASKPQGTTVCPPC

SEQ ID NO: 7793 - protein, 20 aa, Artificial Sequence
  Description of Artificial Sequence: targeting sequence/synthetic sequence
LLSNLGHPESPPRKRLKSKG

SEQ ID NO: 7794 - protein, 20 aa, Artificial Sequence
  Description of Artificial Sequence: targeting sequence/synthetic sequence
NSSIPKACCVPTELSAISML

SEQ ID NO: 7795 - protein, 20 aa, Artificial Sequence
  Description of Artificial Sequence: targeting sequence/synthetic sequence
GFGDPLICDNQVSTGDTRIF

SEQ ID NO: 7796 - protein, 20 aa, Artificial Sequence
  Description of Artificial Sequence: targeting sequence/synthetic sequence
FTSESKRMGVIVRDESTAEI

SEQ ID NO: 7797 - protein, 20 aa, Artificial Sequence
  Description of Artificial Sequence: targeting sequence/synthetic sequence
LVPGLVPPAPRATGMSEKSP

SEQ ID NO: 7798 - protein, 20 aa, Artificial Sequence
  Description of Artificial Sequence: targeting sequence/synthetic sequence
AGYGGSPGHTGSTSMSPSAA

SEQ ID NO: 7799 - protein, 20 aa, Artificial Sequence
  Description of Artificial Sequence: targeting sequence/synthetic sequence
APTEARRRVVEREKRAVGMG

SEQ ID NO: 7800 - protein, 20 aa, Artificial Sequence
  Description of Artificial Sequence: targeting sequence/synthetic sequence
ILPQAKKDFFSSHPLREPVN

SEQ ID NO: 7801 - protein, 20 aa, Artificial Sequence
  Description of Artificial Sequence: targeting sequence/synthetic sequence
QGEDQYYLRVTTVASHTSDS

SEQ ID NO: 7802 - protein, 20 aa, Artificial Sequence
  Description of Artificial Sequence: targeting sequence/synthetic sequence
IVCGEDDPCGTQICECDKAA

SEQ ID NO: 7803 - protein, 20 aa, Artificial Sequence
  Description of Artificial Sequence: targeting sequence/synthetic sequence
GRCSERDARLGLCARSNDAV

SEQ ID NO: 7804 - protein, 20 aa, Artificial Sequence
  Description of Artificial Sequence: targeting sequence/synthetic sequence
PPPGPPRVSPDPRAELDSTV

SEQ ID NO: 7805 - protein, 20 aa, Artificial Sequence
  Description of Artificial Sequence: targeting sequence/synthetic sequence
KMEQVSGVLGIEDYSVSQTT

SEQ ID NO: 7806 - protein, 20 aa, Artificial Sequence
  Description of Artificial Sequence: targeting sequence/synthetic sequence
LLLDPPTNVRDYPKCKTIHH

SEQ ID NO: 7807 - protein, 20 aa, Artificial Sequence
  Description of Artificial Sequence: targeting sequence/synthetic sequence
GLGSPGPKGDKGEPGGPGAD

SEQ ID NO: 7808 - protein, 20 aa, Artificial Sequence
  Description of Artificial Sequence: targeting sequence/synthetic sequence
VGLPGQRGERGFPGLPGPSG

SEQ ID NO: 7809 - protein, 20 aa, Artificial Sequence
  Description of Artificial Sequence: targeting sequence/synthetic sequence
DSEELSAKKRKKSSSEALFK

SEQ ID NO: 7810 - protein, 20 aa, Artificial Sequence
  Description of Artificial Sequence: targeting sequence/synthetic sequence
GSLGSLPASPFRIPEDDEYE

SEQ ID NO: 7811 - protein, 20 aa, Artificial Sequence
  Description of Artificial Sequence: targeting sequence/synthetic sequence
SGKSLLLDPPTNVRDYPKCK

SEQ ID NO: 7812 - protein, 20 aa, Artificial Sequence
  Description of Artificial Sequence: targeting sequence/synthetic sequence
ALEKMMESSFVGPQSFPEVP

SEQ ID NO: 7813 - protein, 20 aa, Artificial Sequence
  Description of Artificial Sequence: targeting sequence/synthetic sequence
KRDIPWPEGEEKLSDNAQSA

SEQ ID NO: 7814 - protein, 20 aa, Artificial Sequence
  Description of Artificial Sequence: targeting sequence/synthetic sequence
IALCHNVTPVYESNGVTDQA

SEQ ID NO: 7815 - protein, 20 aa, Artificial Sequence
  Description of Artificial Sequence: targeting sequence/synthetic sequence
TRASSVPIIPSVGLEETCLQ

SEQ ID NO: 7816 - protein, 20 aa, Artificial Sequence
  Description of Artificial Sequence: targeting sequence/synthetic sequence
PLIICKKDSLDKEKEKHIDR

SEQ ID NO: 7817 - protein, 20 aa, Artificial Sequence
  Description of Artificial Sequence: targeting sequence/synthetic sequence
LLGSEANLTCTLTGLRDASG

SEQ ID NO: 7818 - protein, 20 aa, Artificial Sequence
  Description of Artificial Sequence: targeting sequence/synthetic sequence
FHEKDLVQPINPRLDGCMRS

SEQ ID NO: 7819 - protein, 20 aa, Artificial Sequence
  Description of Artificial Sequence: targeting sequence/synthetic sequence
LEESCAEAQDGELDGLWTTI

SEQ ID NO: 7820 - protein, 20 aa, Artificial Sequence
  Description of Artificial Sequence: targeting sequence/synthetic sequence
FGPGPVLSDNFTDSMIMNGH

SEQ ID NO: 7821 - protein, 20 aa, Artificial Sequence
  Description of Artificial Sequence: targeting sequence/synthetic sequence
GPVTQEFWDNLEKETEGLRQ

SEQ ID NO: 7822 - protein, 20 aa, Artificial Sequence
  Description of Artificial Sequence: targeting sequence/synthetic sequence
EATSALDSESKSAVQAALEK

SEQ ID NO: 7823 - protein, 20 aa, Artificial Sequence
  Description of Artificial Sequence: targeting sequence/synthetic sequence
QQNTDGSGQVSIPIIIPQTI

SEQ ID NO: 7824 - protein, 20 aa, Artificial Sequence
  Description of Artificial Sequence: targeting sequence/synthetic sequence
ETLPAPEFSPEPESGRALRL

SEQ ID NO: 7825 - protein, 20 aa, Artificial Sequence
  Description of Artificial Sequence: targeting sequence/synthetic sequence
GPPGPAGAPGDKGESGPSGP

SEQ ID NO: 7826 - protein, 20 aa, Artificial Sequence
  Description of Artificial Sequence: targeting sequence/synthetic sequence
TLSPFQDAASSSSSSSSSAT

SEQ ID NO: 7827 - protein, 20 aa, Artificial Sequence
  Description of Artificial Sequence: targeting sequence/synthetic sequence
GHAGNLARCSELTQSQASLQ

SEQ ID NO: 7828 - protein, 20 aa, Artificial Sequence
  Description of Artificial Sequence: targeting sequence/synthetic sequence
EVSPGCWIIDDNICDQSCQN

SEQ ID NO: 7829 - protein, 20 aa, Artificial Sequence
  Description of Artificial Sequence: targeting sequence/synthetic sequence
LPGMKGDPGEILGHVPGMLL

SEQ ID NO: 7830 - protein, 20 aa, Artificial Sequence
  Description of Artificial Sequence: targeting sequence/synthetic sequence
GPQGDLLTKTQELGRDYRTC

SEQ ID NO: 7831 - protein, 20 aa, Artificial Sequence
  Description of Artificial Sequence: targeting sequence/synthetic sequence
IGSSHILTPTRFLDDLKALD

SEQ ID NO: 7832 - protein, 20 aa, Artificial Sequence
  Description of Artificial Sequence: targeting sequence/synthetic sequence
TAVAPGPPPGPPRVSPDPRA

SEQ ID NO: 7833 - protein, 20 aa, Artificial Sequence
  Description of Artificial Sequence: targeting sequence/synthetic sequence
VSPPGGDFSDPVTSATLGIV

SEQ ID NO: 7834 - protein, 20 aa, Artificial Sequence
  Description of Artificial Sequence: targeting sequence/synthetic sequence
TMKLCKDASDILQTGTIQGD

SEQ ID NO: 7835 - protein, 20 aa, Artificial Sequence
  Description of Artificial Sequence: targeting sequence/synthetic sequence
HLLPPPSEELALNELVTLTC

SEQ ID NO: 7836 - protein, 20 aa, Artificial Sequence
  Description of Artificial Sequence: targeting sequence/synthetic sequence
KTICQQAVDTVLAKKRVDSL

SEQ ID NO: 7837 - protein, 20 aa, Artificial Sequence
  Description of Artificial Sequence: targeting sequence/synthetic sequence
FCVEDKPGTHFTPVPPTPPD

SEQ ID NO: 7838 - protein, 20 aa, Artificial Sequence
  Description of Artificial Sequence: targeting sequence/synthetic sequence
RAGVPPKVVNYEAGEWAENC

SEQ ID NO: 7839 - protein, 20 aa, Artificial Sequence
  Description of Artificial Sequence: targeting sequence/synthetic sequence
PEKYACKDLRENFCRNPDGS

SEQ ID NO: 7840 - protein, 20 aa, Artificial Sequence
  Description of Artificial Sequence: targeting sequence/synthetic sequence
CPDEPDSQPCSLVPGLVPPA

SEQ ID NO: 7841 - protein, 20 aa, Artificial Sequence
  Description of Artificial Sequence: targeting sequence/synthetic sequence
ARGNDGATGAAGPPGPTGPA

SEQ ID NO: 7842 - protein, 20 aa, Artificial Sequence
  Description of Artificial Sequence: targeting sequence/synthetic sequence
SPTKESCSPSEADDTKALIQ

SEQ ID NO: 7843 - protein, 20 aa, Artificial Sequence
  Description of Artificial Sequence: targeting sequence/synthetic sequence
EAVAPSTHPTSASVTVTTPG

SEQ ID NO: 7844 - protein, 20 aa, Artificial Sequence
  Description of Artificial Sequence: targeting sequence/synthetic sequence
GIPGFPGSKGEMGVMGTPGQ

SEQ ID NO: 7845 - protein, 20 aa, Artificial Sequence
  Description of Artificial Sequence: targeting sequence/synthetic sequence
AIANLKADTSSPEEEYKVAC

SEQ ID NO: 7846 - protein, 20 aa, Artificial Sequence
  Description of Artificial Sequence: targeting sequence/synthetic sequence
EPGPPGPAGAAGPAGNPGAD

SEQ ID NO: 7847 - protein, 20 aa, Artificial Sequence
  Description of Artificial Sequence: targeting sequence/synthetic sequence
AEAPGPSGESRGHSATQLPA

SEQ ID NO: 7848 - protein, 20 aa, Artificial Sequence
  Description of Artificial Sequence: targeting sequence/synthetic sequence
EVEYDCDAPSHNSEKKKTEG

SEQ ID NO: 7849 - protein, 20 aa, Artificial Sequence
  Description of Artificial Sequence: targeting sequence/synthetic sequence
DGVAVLKVGGTSDVEVNEKK

SEQ ID NO: 7850 - protein, 20 aa, Artificial Sequence
  Description of Artificial Sequence: targeting sequence/synthetic sequence
DEEEDPPAKRKCIFMSETQS

SEQ ID NO: 7851 - protein, 20 aa, Artificial Sequence
  Description of Artificial Sequence: targeting sequence/synthetic sequence
ETPQPPRKKRARVDPTVENE

SEQ ID NO: 7852 - protein, 20 aa, Artificial Sequence
  Description of Artificial Sequence: targeting sequence/synthetic sequence
KEGCQKILTVLDPLVPTGSE

SEQ ID NO: 7853 - protein, 20 aa, Artificial Sequence
  Description of Artificial Sequence: targeting sequence/synthetic sequence
KGEGPFSPTTVVYSAEEEPT

SEQ ID NO: 7854 - protein, 20 aa, Artificial Sequence
  Description of Artificial Sequence: targeting sequence/synthetic sequence
SSSSESGSSSRSSSNNSSIS

SEQ ID NO: 7855 - protein, 20 aa, Artificial Sequence
  Description of Artificial Sequence: targeting sequence/synthetic sequence
VLEIASNSQPQDVDSVCSGT

SEQ ID NO: 7856 - protein, 20 aa, Artificial Sequence
  Description of Artificial Sequence: targeting sequence/synthetic sequence
MKLCKDTEDIEQSANIQGDG

SEQ ID NO: 7857 - protein, 20 aa, Artificial Sequence
  Description of Artificial Sequence: targeting sequence/synthetic sequence
FGISDTPLEEIFLKVTEDSD

SEQ ID NO: 7858 - protein, 20 aa, Artificial Sequence
  Description of Artificial Sequence: targeting sequence/synthetic sequence
GCAQLINQLEPALKTGSEGL

SEQ ID NO: 7859 - protein, 20 aa, Artificial Sequence
  Description of Artificial Sequence: targeting sequence/synthetic sequence
PVSPIWEPPPATTSTTPVLS

SEQ ID NO: 7860 - protein, 20 aa, Artificial Sequence
  Description of Artificial Sequence: targeting sequence/synthetic sequence
QKCEIALEKLKNDMAVPTPP

SEQ ID NO: 7861 - protein, 20 aa, Artificial Sequence
  Description of Artificial Sequence: targeting sequence/synthetic sequence
LASPPSQGEVPPGPLPEAVL

SEQ ID NO: 7862 - protein, 20 aa, Artificial Sequence
  Description of Artificial Sequence: targeting sequence/synthetic sequence
PSQEEMTKNQVSLTCLVKGF

SEQ ID NO: 7863 - protein, 20 aa, Artificial Sequence
  Description of Artificial Sequence: targeting sequence/synthetic sequence
EFPYPCYDPATREGDLKLLQ

SEQ ID NO: 7864 - protein, 20 aa, Artificial Sequence
  Description of Artificial Sequence: targeting sequence/synthetic sequence
GYSSTRASSVPIIPSVGLEE

SEQ ID NO: 7865 - protein, 20 aa, Artificial Sequence
  Description of Artificial Sequence: targeting sequence/synthetic sequence
STLSCENKIISFKEMNPPDN

SEQ ID NO: 7866 - protein, 20 aa, Artificial Sequence
  Description of Artificial Sequence: targeting sequence/synthetic sequence
AFQHPPTEFIREGDDDRTVC

SEQ ID NO: 7867 - protein, 20 aa, Artificial Sequence
  Description of Artificial Sequence: targeting sequence/synthetic sequence
YDLNLCGLTEDPDLQVSAMQ

SEQ ID NO: 7868 - protein, 20 aa, Artificial Sequence
  Description of Artificial Sequence: targeting sequence/synthetic sequence
GGKLDAWEKIRLRPGGKKKY

SEQ ID NO: 7869 - protein, 20 aa, Artificial Sequence
  Description of Artificial Sequence: targeting sequence/synthetic sequence
KQYEDSCRVYQASSPDEVAL

SEQ ID NO: 7870 - protein, 20 aa, Artificial Sequence
  Description of Artificial Sequence: targeting sequence/synthetic sequence
AKTRSSRAGLQFPVGRVHRL

SEQ ID NO: 7871 - protein, 20 aa, Artificial Sequence
  Description of Artificial Sequence: targeting sequence/synthetic sequence
LSLHRPALEDLLLGSEANLT

SEQ ID NO: 7872 - protein, 20 aa, Artificial Sequence
  Description of Artificial Sequence: targeting sequence/synthetic sequence
GPPGPTGPAGPPGFPGAVGA

SEQ ID NO: 7873 - protein, 20 aa, Artificial Sequence
  Description of Artificial Sequence: targeting sequence/synthetic sequence
EGCQKIITVLDPLVPTGSEN

SEQ ID NO: 7874 - protein, 20 aa, Artificial Sequence
  Description of Artificial Sequence: targeting sequence/synthetic sequence
KQLEMLENQISTIHQSCPSQ

SEQ ID NO: 7875 - protein, 20 aa, Artificial Sequence
  Description of Artificial Sequence: targeting sequence/synthetic sequence
PGQPGPPGPPGAPGPCCGGV

SEQ ID NO: 7876 - protein, 20 aa, Artificial Sequence
  Description of Artificial Sequence: targeting sequence/synthetic sequence
TLQQEKPDFCFLEEDPGICR

SEQ ID NO: 7877 - protein, 20 aa, Artificial Sequence
  Description of Artificial Sequence: targeting sequence/synthetic sequence
RCAPLSAPTSAAASPLSAAA

SEQ ID NO: 7878 - protein, 20 aa, Artificial Sequence
  Description of Artificial Sequence: targeting sequence/synthetic sequence
EDDTWEPEQKLCKLRKGNCS

SEQ ID NO: 7879 - protein, 20 aa, Artificial Sequence
  Description of Artificial Sequence: targeting sequence/synthetic sequence
LDQNTIETMRKPRCGNPDVA

SEQ ID NO: 7880 - protein, 20 aa, Artificial Sequence
  Description of Artificial Sequence: targeting sequence/synthetic sequence
SQPTLTIQTHPYRTCDPVEM

SEQ ID NO: 7881 - protein, 20 aa, Artificial Sequence
  Description of Artificial Sequence: targeting sequence/synthetic sequence
NSTTPYCNDLMKNLESSPLS

SEQ ID NO: 7882 - protein, 20 aa, Artificial Sequence
  Description of Artificial Sequence: targeting sequence/synthetic sequence
YTLPPSRDELTKNQVSLTCL

SEQ ID NO: 7883 - protein, 20 aa, Artificial Sequence
  Description of Artificial Sequence: targeting sequence/synthetic sequence
PVIPTAPTSKPSSAGGELLD

SEQ ID NO: 7884 - protein, 20 aa, Artificial Sequence
  Description of Artificial Sequence: targeting sequence/synthetic sequence
CALPVALSGSGGPPALNHAV

SEQ ID NO: 7885 - protein, 20 aa, Artificial Sequence
  Description of Artificial Sequence: targeting sequence/synthetic sequence
SSPPHSTGSVRPVRAQGEGL

SEQ ID NO: 7886 - protein, 20 aa, Artificial Sequence
  Description of Artificial Sequence: targeting sequence/synthetic sequence
VCRDKLSSTNQLRSVGLNLE

SEQ ID NO: 7887 - protein, 20 aa, Artificial Sequence
  Description of Artificial Sequence: targeting sequence/synthetic sequence
TTRLTATEAQTTPLAATEAQ

SEQ ID NO: 7888 - protein, 20 aa, Artificial Sequence
  Description of Artificial Sequence: targeting sequence/synthetic sequence
IRQTAGKGLEWIGYISHSGS

SEQ ID NO: 7889 - protein, 20 aa, Artificial Sequence
  Description of Artificial Sequence: targeting sequence/synthetic sequence
EVPEAQEDVEATFPVHQPGN

SEQ ID NO: 7890 - protein, 20 aa, Artificial Sequence
  Description of Artificial Sequence: targeting sequence/synthetic sequence
KSSCSLDCDLPQTHSLGHRR

SEQ ID NO: 7891 - protein, 20 aa, Artificial Sequence
  Description of Artificial Sequence: targeting sequence/synthetic sequence
MMAFIEQEANEKAEEIDAKA

SEQ ID NO: 7892 - protein, 20 aa, Artificial Sequence
  Description of Artificial Sequence: targeting sequence/synthetic sequence
RSALESSPDPATLSKEDARL

SEQ ID NO: 7893 - protein, 20 aa, Artificial Sequence
  Description of Artificial Sequence: targeting sequence/synthetic sequence
GDQGDHGVPGAKGLPGPPGP

SEQ ID NO: 7894 - protein, 20 aa, Artificial Sequence
  Description of Artificial Sequence: targeting sequence/synthetic sequence
WTLSPFQDAASSSSSSSSSA

SEQ ID NO: 7895 - protein, 20 aa, Artificial Sequence
  Description of Artificial Sequence: targeting sequence/synthetic sequence
RGAPGEKGEGGPPGVAGPPG

SEQ ID NO: 7896 - protein, 20 aa, Artificial Sequence
  Description of Artificial Sequence: targeting sequence/synthetic sequence
EVSPGCWVIDNNICDQSCQN

SEQ ID NO: 7897 - protein, 20 aa, Artificial Sequence
  Description of Artificial Sequence: targeting sequence/synthetic sequence
ERLRRGLAAGTSNPDPPTVS

SEQ ID NO: 7898 - protein, 20 aa, Artificial Sequence
  Description of Artificial Sequence: targeting sequence/synthetic sequence
LQDEFPGIPSPLDAAVECHR

SEQ ID NO: 7899 - protein, 20 aa, Artificial Sequence
  Description of Artificial Sequence: targeting sequence/synthetic sequence
CPLILTQELGKANTTDFGLT

SEQ ID NO: 7900 - protein, 20 aa, Artificial Sequence
  Description of Artificial Sequence: targeting sequence/synthetic sequence
RTAEPAESSVPPVTSIGIDN

SEQ ID NO: 7901 - protein, 20 aa, Artificial Sequence
  Description of Artificial Sequence: targeting sequence/synthetic sequence
GGSPGHTGSTSMSPSAALST

SEQ ID NO: 7902 - protein, 20 aa, Artificial Sequence
  Description of Artificial Sequence: targeting sequence/synthetic sequence
LLKLDGKFSVVYAKCDSSPD

SEQ ID NO: 7903 - protein, 20 aa, Artificial Sequence
  Description of Artificial Sequence: targeting sequence/synthetic sequence
TANTTDEPTTQPTTEPTTQP

SEQ ID NO: 7904 - protein, 20 aa, Artificial Sequence
  Description of Artificial Sequence: targeting sequence/synthetic sequence
SSIFDGLVEEDDKDKAKRVS

SEQ ID NO: 7905 - protein, 20 aa, Artificial Sequence
  Description of Artificial Sequence: targeting sequence/synthetic sequence
KEEKDPGMGAMGGMGGGMGG

SEQ ID NO: 7906 - protein, 20 aa, Artificial Sequence
  Description of Artificial Sequence: targeting sequence/synthetic sequence
RLSPLAERQLQVQWEPPGSW

SEQ ID NO: 7907 - protein, 20 aa, Artificial Sequence
  Description of Artificial Sequence: targeting sequence/synthetic sequence
TTGSFCPGPVTLCSDLESHS

SEQ ID NO: 7908 - protein, 20 aa, Artificial Sequence
  Description of Artificial Sequence: targeting sequence/synthetic sequence
GYDVEKNNSRIKLGLKSLVS

SEQ ID NO: 7909 - protein, 20 aa, Artificial Sequence
  Description of Artificial Sequence: targeting sequence/synthetic sequence
KVVDFGSATYDDEHHSTLVS

SEQ ID NO: 7910 - protein, 20 aa, Artificial Sequence
  Description of Artificial Sequence: targeting sequence/synthetic sequence
TSDLVFHMRSHHKKEHAGPD

SEQ ID NO: 7911 - protein, 20 aa, Artificial Sequence
  Description of Artificial Sequence: targeting sequence/synthetic sequence
RNNVPCSPKVDFTLSSERDF

SEQ ID NO: 7912 - protein, 20 aa, Artificial Sequence
  Description of Artificial Sequence: targeting sequence/synthetic sequence
LIKYKKTLLGDGPVVTDPKA

SEQ ID NO: 7913 - protein, 20 aa, Artificial Sequence
  Description of Artificial Sequence: targeting sequence/synthetic sequence
SLVPGLVPPAPRATGMSEKS

SEQ ID NO: 7914 - protein, 20 aa, Artificial Sequence
  Description of Artificial Sequence: targeting sequence/synthetic sequence
VDIPKQEKALMKAVATVGPI

SEQ ID NO: 7915 - protein, 20 aa, Artificial Sequence
  Description of Artificial Sequence: targeting sequence/synthetic sequence
GPGSPGLPGPKGEPGKIVPL

SEQ ID NO: 7916 - protein, 20 aa, Artificial Sequence
  Description of Artificial Sequence: targeting sequence/synthetic sequence
ETLGKDITPINEDIEETNIA

SEQ ID NO: 7917 - protein, 20 aa, Artificial Sequence
  Description of Artificial Sequence: targeting sequence/synthetic sequence
TESRGSESGIFTNTKESSSH

SEQ ID NO: 7918 - protein, 20 aa, Artificial Sequence
  Description of Artificial Sequence: targeting sequence/synthetic sequence
PETTTSGGCHSPEDTPKDNA

SEQ ID NO: 7919 - protein, 20 aa, Artificial Sequence
  Description of Artificial Sequence: targeting sequence/synthetic sequence
GPPPGPPRVSPDPRAELDST

SEQ ID NO: 7920 - protein, 20 aa, Artificial Sequence
  Description of Artificial Sequence: targeting sequence/synthetic sequence
VCESAPGPITMDLTGDLEAL

SEQ ID NO: 7921 - protein, 20 aa, Artificial Sequence
  Description of Artificial Sequence: targeting sequence/synthetic sequence
AMHDYNQAEMKQRDNCKIRI

SEQ ID NO: 7922 - protein, 20 aa, Artificial Sequence
  Description of Artificial Sequence: targeting sequence/synthetic sequence
TLAEEHQGGTVCKRDQSDRG

SEQ ID NO: 7923 - protein, 20 aa, Artificial Sequence
  Description of Artificial Sequence: targeting sequence/synthetic sequence
NLARCSELTQSQASLQSASS

SEQ ID NO: 7924 - protein, 20 aa, Artificial Sequence
  Description of Artificial Sequence: targeting sequence/synthetic sequence
STSWSTSTETGVKMSSEFEV

SEQ ID NO: 7925 - protein, 20 aa, Artificial Sequence
  Description of Artificial Sequence: targeting sequence/synthetic sequence
ETGPAGPPGAPGAPGAPGPV

SEQ ID NO: 7926 - protein, 20 aa, Artificial Sequence
  Description of Artificial Sequence: targeting sequence/synthetic sequence
RRVVEREKRAVGMGAFFLGF

SEQ ID NO: 7927 - protein, 20 aa, Artificial Sequence
  Description of Artificial Sequence: targeting sequence/synthetic sequence
ILSDLLCGYPEGGGSRVLSF

SEQ ID NO: 7928 - protein, 20 aa, Artificial Sequence
  Description of Artificial Sequence: targeting sequence/synthetic sequence
KPHTDEDLVYLEPSPDFCEQ

SEQ ID NO: 7929 - protein, 20 aa, Artificial Sequence
  Description of Artificial Sequence: targeting sequence/synthetic sequence
GKRGLSLGPEEKGTSGVQKK

SEQ ID NO: 7930 - protein, 20 aa, Artificial Sequence
  Description of Artificial Sequence: targeting sequence/synthetic sequence
RSTSESTAALGCLVKDYFPE

SEQ ID NO: 7931 - protein, 20 aa, Artificial Sequence
  Description of Artificial Sequence: targeting sequence/synthetic sequence
AADLLEKMLELDVDKRLTAA

SEQ ID NO: 7932 - protein, 20 aa, Artificial Sequence
  Description of Artificial Sequence: targeting sequence/synthetic sequence
LLPPAREQLNLRESATITCL

SEQ ID NO: 7933 - protein, 20 aa, Artificial Sequence
  Description of Artificial Sequence: targeting sequence/synthetic sequence
GAEVMSPGASVRVSCKTSGY

SEQ ID NO: 7934 - protein, 20 aa, Artificial Sequence
  Description of Artificial Sequence: targeting sequence/synthetic sequence
KADQCYEDVRVSQTTWDSGF

SEQ ID NO: 7935 - protein, 20 aa, Artificial Sequence
  Description of Artificial Sequence: targeting sequence/synthetic sequence
ILEGVQCEVQLVESGGGLVQ

SEQ ID NO: 7936 - protein, 20 aa, Artificial Sequence
  Description of Artificial Sequence: targeting sequence/synthetic sequence
KEFDQSKFVETDFSEKACFF

SEQ ID NO: 7937 - protein, 20 aa, Artificial Sequence
  Description of Artificial Sequence: targeting sequence/synthetic sequence
LGPVTQEFWDNLEKETEGLR

SEQ ID NO: 7938 - protein, 20 aa, Artificial Sequence
  Description of Artificial Sequence: targeting sequence/synthetic sequence
RGWGNGCGLFGKGGIVTCAM

SEQ ID NO: 7939 - protein, 20 aa, Artificial Sequence
  Description of Artificial Sequence: targeting sequence/synthetic sequence
KKVMNWKETLTFPPEVPISE

SEQ ID NO: 7940 - protein, 20 aa, Artificial Sequence
  Description of Artificial Sequence: targeting sequence/synthetic sequence
PTATKRWGFRAGVPPKVVNY

SEQ ID NO: 7941 - protein, 20 aa, Artificial Sequence
  Description of Artificial Sequence: targeting sequence/synthetic sequence
PEEVKKRKKAVLFCLSEDKK

SEQ ID NO: 7942 - protein, 20 aa, Artificial Sequence
  Description of Artificial Sequence: targeting sequence/synthetic sequence
VRPEDCSIGLLPRNHDKNRS

SEQ ID NO: 7943 - protein, 20 aa, Artificial Sequence
  Description of Artificial Sequence: targeting sequence/synthetic sequence
FGGFDSTKDLPDDVITFARS

SEQ ID NO: 7944 - protein, 20 aa, Artificial Sequence
  Description of Artificial Sequence: targeting sequence/synthetic sequence
LEIASNNQPQNVDSVCSGTL

SEQ ID NO: 7945 - protein, 20 aa, Artificial Sequence
  Description of Artificial Sequence: targeting sequence/synthetic sequence
GPAGPPGFPGAVGAKGEAGP

SEQ ID NO: 7946 - protein, 20 aa, Artificial Sequence
  Description of Artificial Sequence: targeting sequence/synthetic sequence
KVLSVCSSNKPAIVEAGGMQ

SEQ ID NO: 7947 - protein, 20 aa, Artificial Sequence
  Description of Artificial Sequence: targeting sequence/synthetic sequence
STSAPLSPTSGTSVGMSTFS

SEQ ID NO: 7948 - protein, 20 aa, Artificial Sequence
  Description of Artificial Sequence: targeting sequence/synthetic sequence
PSSPPHSTGSVRPVRAQGEG

SEQ ID NO: 7949 - protein, 20 aa, Artificial Sequence
  Description of Artificial Sequence: targeting sequence/synthetic sequence
TQPTTGSFCPGPVTLCSDLE

SEQ ID NO: 7950 - protein, 20 aa, Artificial Sequence
  Description of Artificial Sequence: targeting sequence/synthetic sequence
SKINYSQCEPILDDKQRKYD

SEQ ID NO: 7951 - protein, 20 aa, Artificial Sequence
  Description of Artificial Sequence: targeting sequence/synthetic sequence
GVATDVPSATKRWGFRSGVP

SEQ ID NO: 7952 - protein, 20 aa, Artificial Sequence
  Description of Artificial Sequence: targeting sequence/synthetic sequence
TVTVHDFPGKKLVLSSEKTV

SEQ ID NO: 7953 - protein, 20 aa, Artificial Sequence
  Description of Artificial Sequence: targeting sequence/synthetic sequence
EIVQTNGETEPAPLETKPPP

SEQ ID NO: 7954 - protein, 20 aa, Artificial Sequence
  Description of Artificial Sequence: targeting sequence/synthetic sequence
IARVADTMPSGPTNSEAVPA

SEQ ID NO: 7955 - protein, 20 aa, Artificial Sequence
  Description of Artificial Sequence: targeting sequence/synthetic sequence
KVESELIKPINPRLDGCIRS

SEQ ID NO: 7956 - protein, 20 aa, Artificial Sequence
  Description of Artificial Sequence: targeting sequence/synthetic sequence
DGVRGLTGPIGPPGPAGAPG

SEQ ID NO: 7957 - protein, 20 aa, Artificial Sequence
  Description of Artificial Sequence: targeting sequence/synthetic sequence
PAGPPGRDGIPGQPGLPGPP

SEQ ID NO: 7958 - protein, 20 aa, Artificial Sequence
  Description of Artificial Sequence: targeting sequence/synthetic sequence
GTQTYICNVNHKPSNTKVDK

SEQ ID NO: 7959 - protein, 20 aa, Artificial Sequence
  Description of Artificial Sequence: targeting sequence/synthetic sequence
PLGEKGERGYPGTPGPRGEP

SEQ ID NO: 7960 - protein, 20 aa, Artificial Sequence
  Description of Artificial Sequence: targeting sequence/synthetic sequence
KTHMMSAVDRSFTDQSTLQE

SEQ ID NO: 7961 - protein, 20 aa, Artificial Sequence
  Description of Artificial Sequence: targeting sequence/synthetic sequence
PGTCPSKTFGGFDSTKDLPD

SEQ ID NO: 7962 - protein, 20 aa, Artificial Sequence
  Description of Artificial Sequence: targeting sequence/synthetic sequence
TAAPATVPSTTAPFFSSSTL

SEQ ID NO: 7963 - protein, 20 aa, Artificial Sequence
  Description of Artificial Sequence: targeting sequence/synthetic sequence
TAAIGRVADTVGTGPTNSEA

SEQ ID NO: 7964 - protein, 20 aa, Artificial Sequence
  Description of Artificial Sequence: targeting sequence/synthetic sequence
ALLQLAPAQAPVSQPDAPGH

SEQ ID NO: 7965 - protein, 20 aa, Artificial Sequence
  Description of Artificial Sequence: targeting sequence/synthetic sequence
AQEDVEATFPVHQPGNYSCS

SEQ ID NO: 7966 - protein, 20 aa, Artificial Sequence
  Description of Artificial Sequence: targeting sequence/synthetic sequence
SPPSQGEVPPGPLPEAVLAL

SEQ ID NO: 7967 - protein, 20 aa, Artificial Sequence
  Description of Artificial Sequence: targeting sequence/synthetic sequence
CVEDKPGTHFTPVPPTPPDA

SEQ ID NO: 7968 - protein, 20 aa, Artificial Sequence
  Description of Artificial Sequence: targeting sequence/synthetic sequence
DKQETAINIGYSCRLVSQNM

SEQ ID NO: 7969 - protein, 20 aa, Artificial Sequence
  Description of Artificial Sequence: targeting sequence/synthetic sequence
RCPLAAKEESIPKIPDGLLI

SEQ ID NO: 7970 - protein, 20 aa, Artificial Sequence
  Description of Artificial Sequence: targeting sequence/synthetic sequence
CDEHSTESRCCRYPLTVDFE

SEQ ID NO: 7971 - protein, 20 aa, Artificial Sequence
  Description of Artificial Sequence: targeting sequence/synthetic sequence
STTPYCNDLMKNLESSPLSR

SEQ ID NO: 7972 - protein, 20 aa, Artificial Sequence
  Description of Artificial Sequence: targeting sequence/synthetic sequence
TEFIREGDDDRTVCREIRHN

SEQ ID NO: 7973 - protein, 20 aa, Artificial Sequence
  Description of Artificial Sequence: targeting sequence/synthetic sequence
VFESNPSIRKRQQTRLLRKL

SEQ ID NO: 7974 - protein, 20 aa, Artificial Sequence
  Description of Artificial Sequence: targeting sequence/synthetic sequence
PLGREGTFCQTASGQDGSGP

SEQ ID NO: 7975 - protein, 20 aa, Artificial Sequence
  Description of Artificial Sequence: targeting sequence/synthetic sequence
WEQIRLKPGSKKKYRLKHLV

SEQ ID NO: 7976 - protein, 20 aa, Artificial Sequence
  Description of Artificial Sequence: targeting sequence/synthetic sequence
PTPSPSTPPTPSPSCCHPRL

SEQ ID NO: 7977 - protein, 20 aa, Artificial Sequence
  Description of Artificial Sequence: targeting sequence/synthetic sequence
AELSFSVSQVERSLREGHYA

SEQ ID NO: 7978 - protein, 20 aa, Artificial Sequence
  Description of Artificial Sequence: targeting sequence/synthetic sequence
IKHTVENGTGPSSAPDRGVN

SEQ ID NO: 7979 - protein, 20 aa, Artificial Sequence
  Description of Artificial Sequence: targeting sequence/synthetic sequence
PTESDFLMQVDGKPKCCFFK

SEQ ID NO: 7980 - protein, 20 aa, Artificial Sequence
  Description of Artificial Sequence: targeting sequence/synthetic sequence
TIESSSDEEEDPPAKRKCIF

SEQ ID NO: 7981 - protein, 20 aa, Artificial Sequence
  Description of Artificial Sequence: targeting sequence/synthetic sequence
IEQEANEKAEEIDAKAEEEF

SEQ ID NO: 7982 - protein, 20 aa, Artificial Sequence
  Description of Artificial Sequence: targeting sequence/synthetic sequence
RASPADLVYFEKSPDFCERE

SEQ ID NO: 7983 - protein, 20 aa, Artificial Sequence
  Description of Artificial Sequence: targeting sequence/synthetic sequence
STGCEIDWNEGKNVTLKTIK

SEQ ID NO: 7984 - protein, 20 aa, Artificial Sequence
  Description of Artificial Sequence: targeting sequence/synthetic sequence
VPPKVVNYEAGEWAENCYNL

SEQ ID NO: 7985 - protein, 20 aa, Artificial Sequence
  Description of Artificial Sequence: targeting sequence/synthetic sequence
SSPSTQLSADPSLDGLPAAE

SEQ ID NO: 7986 - protein, 20 aa, Artificial Sequence
  Description of Artificial Sequence: targeting sequence/synthetic sequence
DAFQDWGPGSMAHVSVVPVS

SEQ ID NO: 7987 - protein, 20 aa, Artificial Sequence
  Description of Artificial Sequence: targeting sequence/synthetic sequence
HCEKGLVEKSAGDVDTLAFD

SEQ ID NO: 7988 - protein, 20 aa, Artificial Sequence
  Description of Artificial Sequence: targeting sequence/synthetic sequence
VESHRKGCDTLDISVPPGSR

SEQ ID NO: 7989 - protein, 20 aa, Artificial Sequence
  Description of Artificial Sequence: targeting sequence/synthetic sequence
FGELCPNTAPLPQLVTEALQ

SEQ ID NO: 7990 - protein, 20 aa, Artificial Sequence
  Description of Artificial Sequence: targeting sequence/synthetic sequence
IQQNTDGSGQVSIPIIIPQT

SEQ ID NO: 7991 - protein, 20 aa, Artificial Sequence
  Description of Artificial Sequence: targeting sequence/synthetic sequence
VLEIPYVTKQGDSWLKKFTE

SEQ ID NO: 7992 - protein, 20 aa, Artificial Sequence
  Description of Artificial Sequence: targeting sequence/synthetic sequence
VFSKMEQVSGVLGIEDYSVS

SEQ ID NO: 7993 - protein, 20 aa, Artificial Sequence
  Description of Artificial Sequence: targeting sequence/synthetic sequence
TGGVKKPHRYRPGTVALREI

SEQ ID NO: 7994 - protein, 20 aa, Artificial Sequence
  Description of Artificial Sequence: targeting sequence/synthetic sequence
MEGGELFDKVVGNKRLKEAT

SEQ ID NO: 7995 - protein, 20 aa, Artificial Sequence
  Description of Artificial Sequence: targeting sequence/synthetic sequence
GAKGEPGPVGVQGPPGPAGE

SEQ ID NO: 7996 - protein, 20 aa, Artificial Sequence
  Description of Artificial Sequence: targeting sequence/synthetic sequence
LAALLQLAPAQAPVSQPDAP

SEQ ID NO: 7997 - protein, 20 aa, Artificial Sequence
  Description of Artificial Sequence: targeting sequence/synthetic sequence
PPSAHAGADDVVDSSKSFVM

SEQ ID NO: 7998 - protein, 20 aa, Artificial Sequence
  Description of Artificial Sequence: targeting sequence/synthetic sequence
FGLMDTTLEEVFLKVSEEDQ

SEQ ID NO: 7999 - protein, 20 aa, Artificial Sequence
  Description of Artificial Sequence: targeting sequence/synthetic sequence
ATSALDSESKSAVQAALEKA

SEQ ID NO: 8000 - protein, 20 aa, Artificial Sequence
  Description of Artificial Sequence: targeting sequence/synthetic sequence
PKPLKKLRFDIEGSDEADGS

SEQ ID NO: 8001 - protein, 20 aa, Artificial Sequence
  Description of Artificial Sequence: targeting sequence/synthetic sequence
REGTFCQTASGQDGSGPFLA

SEQ ID NO: 8002 - protein, 20 aa, Artificial Sequence
  Description of Artificial Sequence: targeting sequence/synthetic sequence
SLLLDPPTNVRDYPKCKTIH

SEQ ID NO: 8003 - protein, 20 aa, Artificial Sequence
  Description of Artificial Sequence: targeting sequence/synthetic sequence
ETATPAPVEKSPAKKKATKK

SEQ ID NO: 8004 - protein, 20 aa, Artificial Sequence
  Description of Artificial Sequence: targeting sequence/synthetic sequence
YKDCHLAQVPSHTVVARSMG

SEQ ID NO: 8005 - protein, 20 aa, Artificial Sequence
  Description of Artificial Sequence: targeting sequence/synthetic sequence
EGPFSPTTVVYSAEEEPTKP

SEQ ID NO: 8006 - protein, 20 aa, Artificial Sequence
  Description of Artificial Sequence: targeting sequence/synthetic sequence
TTPYCNDLMKNLESSPLSRI

SEQ ID NO: 8007 - protein, 20 aa, Artificial Sequence
  Description of Artificial Sequence: targeting sequence/synthetic sequence
GPPGPAGEEGKRGARGEPGP

SEQ ID NO: 8008 - protein, 20 aa, Artificial Sequence
  Description of Artificial Sequence: targeting sequence/synthetic sequence
GETEPAPLETKPPPSGPQPT

SEQ ID NO: 8009 - protein, 20 aa, Artificial Sequence
  Description of Artificial Sequence: targeting sequence/synthetic sequence
TCQEAPTDECKPVKWCALSH

SEQ ID NO: 8010 - protein, 20 aa, Artificial Sequence
  Description of Artificial Sequence: targeting sequence/synthetic sequence
CRCSEGYQGDGIHCLDIDEC

SEQ ID NO: 8011 - protein, 20 aa, Artificial Sequence
  Description of Artificial Sequence: targeting sequence/synthetic sequence
ESKVFISNSTNSSNPCERRS

SEQ ID NO: 8012 - protein, 20 aa, Artificial Sequence
  Description of Artificial Sequence: targeting sequence/synthetic sequence
EGCRQILGQLQPSLQTGSEE

SEQ ID NO: 8013 - protein, 20 aa, Artificial Sequence
  Description of Artificial Sequence: targeting sequence/synthetic sequence
ENADSQIKLSIKRLVTTGVL

SEQ ID NO: 8014 - protein, 20 aa, Artificial Sequence
  Description of Artificial Sequence: targeting sequence/synthetic sequence
ECKGGCFFPLADDVTPTKHA

SEQ ID NO: 8015 - protein, 20 aa, Artificial Sequence
  Description of Artificial Sequence: targeting sequence/synthetic sequence
AGVLCELAQDKEAAEAIEAE

SEQ ID NO: 8016 - protein, 20 aa, Artificial Sequence
  Description of Artificial Sequence: targeting sequence/synthetic sequence
TLEFNSKDFIAEDINVFMKD

SEQ ID NO: 8017 - protein, 20 aa, Artificial Sequence
  Description of Artificial Sequence: targeting sequence/synthetic sequence
KLRLASPPSQGEVPPGPLPE

SEQ ID NO: 8018 - protein, 20 aa, Artificial Sequence
  Description of Artificial Sequence: targeting sequence/synthetic sequence
LPLPPDGVRGFPRCRYVHKV

SEQ ID NO: 8019 - protein, 20 aa, Artificial Sequence
  Description of Artificial Sequence: targeting sequence/synthetic sequence
PISPGDLTMVITPDYDDCHS

SEQ ID NO: 8020 - protein, 20 aa, Artificial Sequence
  Description of Artificial Sequence: targeting sequence/synthetic sequence
GTCQEAPTDECKPVKWCALS

SEQ ID NO: 8021 - protein, 20 aa, Artificial Sequence
  Description of Artificial Sequence: targeting sequence/synthetic sequence
CPVPSTPPTPSPSTPPTPSP

SEQ ID NO: 8022 - protein, 20 aa, Artificial Sequence
  Description of Artificial Sequence: targeting sequence/synthetic sequence
KSVTCHVKHYTNPSQDVTVP

SEQ ID NO: 8023 - protein, 20 aa, Artificial Sequence
  Description of Artificial Sequence: targeting sequence/synthetic sequence
RHESHTWSLERSESLTSDSQ

SEQ ID NO: 8024 - protein, 20 aa, Artificial Sequence
  Description of Artificial Sequence: targeting sequence/synthetic sequence
ITGKDCQDIANKGAKQSGLY

SEQ ID NO: 8025 - protein, 20 aa, Artificial Sequence
  Description of Artificial Sequence: targeting sequence/synthetic sequence
WHSDYKVKGLCDSNLISMDI

SEQ ID NO: 8026 - protein, 20 aa, Artificial Sequence
  Description of Artificial Sequence: targeting sequence/synthetic sequence
SSNAQRSSEFKIVASDSTES

SEQ ID NO: 8027 - protein, 20 aa, Artificial Sequence
  Description of Artificial Sequence: targeting sequence/synthetic sequence
GPAGPPGPIGNVGAPGAKGA

SEQ ID NO: 8028 - protein, 20 aa, Artificial Sequence
  Description of Artificial Sequence: targeting sequence/synthetic sequence
RGERGFPGLPGPSGEPGKQG

SEQ ID NO: 8029 - protein, 20 aa, Artificial Sequence
  Description of Artificial Sequence: targeting sequence/synthetic sequence
LIICKKDSLDKEKEKHIDRE

SEQ ID NO: 8030 - protein, 20 aa, Artificial Sequence
  Description of Artificial Sequence: targeting sequence/synthetic sequence
LGHPESPPRKRLKSKGSDKD

SEQ ID NO: 8031 - protein, 20 aa, Artificial Sequence
  Description of Artificial Sequence: targeting sequence/synthetic sequence
SDYKVKGLCDSNLISMDITF

SEQ ID NO: 8032 - protein, 20 aa, Artificial Sequence
  Description of Artificial Sequence: targeting sequence/synthetic sequence
EGSNPPKPLKKLRFDIEGSD

SEQ ID NO: 8033 - protein, 20 aa, Artificial Sequence
  Description of Artificial Sequence: targeting sequence/synthetic sequence
LPPGPMVSEPAGAAAEGTLR

SEQ ID NO: 8034 - protein, 20 aa, Artificial Sequence
  Description of Artificial Sequence: targeting sequence/synthetic sequence
SLPFDEDYIIEIKPFSDGGD

SEQ ID NO: 8035 - protein, 20 aa, Artificial Sequence
  Description of Artificial Sequence: targeting sequence/synthetic sequence
QSSVLNWQDCEVPSPQSCSP

SEQ ID NO: 8036 - protein, 20 aa, Artificial Sequence
  Description of Artificial Sequence: targeting sequence/synthetic sequence
KLVEDRWNKPQKTRGHRESH

SEQ ID NO: 8037 - protein, 20 aa, Artificial Sequence
  Description of Artificial Sequence: targeting sequence/synthetic sequence
RQILGQLQPSLQTGSEECRS

SEQ ID NO: 8038 - protein, 20 aa, Artificial Sequence
  Description of Artificial Sequence: targeting sequence/synthetic sequence
SGGTAALGCLVKDYFPEPVT

SEQ ID NO: 8039 - protein, 20 aa, Artificial Sequence
  Description of Artificial Sequence: targeting sequence/synthetic sequence
TLQVSDVDKLVCRDKLSSTN

SEQ ID NO: 8040 - protein, 20 aa, Artificial Sequence
  Description of Artificial Sequence: targeting sequence/synthetic sequence
KCDSSPDSAEDVRKVCQDCP

SEQ ID NO: 8041 - protein, 20 aa, Artificial Sequence
  Description of Artificial Sequence: targeting sequence/synthetic sequence
GASGPMGPRGPPGPPGKNGD

SEQ ID NO: 8042 - protein, 20 aa, Artificial Sequence
  Description of Artificial Sequence: targeting sequence/synthetic sequence
KPELPQDGTSTLRENSKPEE

SEQ ID NO: 8043 - protein, 20 aa, Artificial Sequence
  Description of Artificial Sequence: targeting sequence/synthetic sequence
CHPRLSLHRPALEDLLLGSE

SEQ ID NO: 8044 - protein, 20 aa, Artificial Sequence
  Description of Artificial Sequence: targeting sequence/synthetic sequence
EKGVPGIPGPQGSPGLPGDK

SEQ ID NO: 8045 - protein, 20 aa, Artificial Sequence
  Description of Artificial Sequence: targeting sequence/synthetic sequence
PVGRVHRLLRKGNYAERVGA

SEQ ID NO: 8046 - protein, 20 aa, Artificial Sequence
  Description of Artificial Sequence: targeting sequence/synthetic sequence
KFGRCPLAAKEESIPKIPDG

SEQ ID NO: 8047 - protein, 20 aa, Artificial Sequence
  Description of Artificial Sequence: targeting sequence/synthetic sequence
LIAGSKVLILDEPTSGMDAI

SEQ ID NO: 8048 - protein, 20 aa, Artificial Sequence
  Description of Artificial Sequence: targeting sequence/synthetic sequence
QHRSHRQMVATTNPLIRHEN

SEQ ID NO: 8049 - protein, 20 aa, Artificial Sequence
  Description of Artificial Sequence: targeting sequence/synthetic sequence
QGPQGEKGEAGPPGPPGIVI

SEQ ID NO: 8050 - protein, 20 aa, Artificial Sequence
  Description of Artificial Sequence: targeting sequence/synthetic sequence
EWLKVKILPEVKEKHEFLNR

SEQ ID NO: 8051 - protein, 20 aa, Artificial Sequence
  Description of Artificial Sequence: targeting sequence/synthetic sequence
QHRSHRQMATATNPLIRHEN

SEQ ID NO: 8052 - protein, 20 aa, Artificial Sequence
  Description of Artificial Sequence: targeting sequence/synthetic sequence
FTMKLCKDTEDIEQSANIQG

SEQ ID NO: 8053 - protein, 20 aa, Artificial Sequence
  Description of Artificial Sequence: targeting sequence/synthetic sequence
QIGPIGEKGSRGDPGTPGVP

SEQ ID NO: 8054 - protein, 20 aa, Artificial Sequence
  Description of Artificial Sequence: targeting sequence/synthetic sequence
DSQHRSYRQMATTTNPLIRH

SEQ ID NO: 8055 - protein, 20 aa, Artificial Sequence
  Description of Artificial Sequence: targeting sequence/synthetic sequence
SQHRSHRQMVATTNPLIRHE

SEQ ID NO: 8056 - protein, 20 aa, Artificial Sequence
  Description of Artificial Sequence: targeting sequence/synthetic sequence
APSAAALATPDTLQGQCSAF

SEQ ID NO: 8057 - protein, 20 aa, Artificial Sequence
  Description of Artificial Sequence: targeting sequence/synthetic sequence
SPGPHCAQTEVIATLKNGKK

SEQ ID NO: 8058 - protein, 20 aa, Artificial Sequence
  Description of Artificial Sequence: targeting sequence/synthetic sequence
AGGTAEVAPDAVPRSGRSCW

SEQ ID NO: 8059 - protein, 20 aa, Artificial Sequence
  Description of Artificial Sequence: targeting sequence/synthetic sequence
RPEDCSIGLLPRNHDKNRSM

SEQ ID NO: 8060 - protein, 20 aa, Artificial Sequence
  Description of Artificial Sequence: targeting sequence/synthetic sequence
YDFWGHGTLVTVSSASTKGP

SEQ ID NO: 8061 - protein, 20 aa, Artificial Sequence
  Description of Artificial Sequence: targeting sequence/synthetic sequence
RQMVITTNPLIRHENRMVLA

SEQ ID NO: 8062 - protein, 20 aa, Artificial Sequence
  Description of Artificial Sequence: targeting sequence/synthetic sequence
KKAGPPGPNGPPGPPGPPGP

SEQ ID NO: 8063 - protein, 20 aa, Artificial Sequence
  Description of Artificial Sequence: targeting sequence/synthetic sequence
GVCISPEAIVTADGADFPMD

SEQ ID NO: 8064 - protein, 20 aa, Artificial Sequence
  Description of Artificial Sequence: targeting sequence/synthetic sequence
LPPAREQLNLRESATITCLV

SEQ ID NO: 8065 - protein, 20 aa, Artificial Sequence
  Description of Artificial Sequence: targeting sequence/synthetic sequence
GCQKILRVLDPLVPTGSENL

SEQ ID NO: 8066 - protein, 20 aa, Artificial Sequence
  Description of Artificial Sequence: targeting sequence/synthetic sequence
NLKADTSSPEEEYKVACLLL

SEQ ID NO: 8067 - protein, 20 aa, Artificial Sequence
  Description of Artificial Sequence: targeting sequence/synthetic sequence
RRKLGAEEAARAVDDGGCSR

SEQ ID NO: 8068 - protein, 20 aa, Artificial Sequence
  Description of Artificial Sequence: targeting sequence/synthetic sequence
PAIPGAMSRRVMNVHEAVNC

SEQ ID NO: 8069 - protein, 20 aa, Artificial Sequence
  Description of Artificial Sequence: targeting sequence/synthetic sequence
RERKAAFKGDSGGPLLCNNV

SEQ ID NO: 8070 - protein, 20 aa, Artificial Sequence
  Description of Artificial Sequence: targeting sequence/synthetic sequence
WQEQYDGREGRTVVHCLNGG

SEQ ID NO: 8071 - protein, 20 aa, Artificial Sequence
  Description of Artificial Sequence: targeting sequence/synthetic sequence
PPPPPIARAVVPSKRQRVSG

SEQ ID NO: 8072 - protein, 20 aa, Artificial Sequence
  Description of Artificial Sequence: targeting sequence/synthetic sequence
GQCALPVALSGSGGPPALNH

SEQ ID NO: 8073 - protein, 20 aa, Artificial Sequence
  Description of Artificial Sequence: targeting sequence/synthetic sequence
PKRRVVEREKRAALGALFLG

SEQ ID NO: 8074 - protein, 20 aa, Artificial Sequence
  Description of Artificial Sequence: targeting sequence/synthetic sequence
RGLKYIHSADIIHRDLKPSN

SEQ ID NO: 8075 - protein, 20 aa, Artificial Sequence
  Description of Artificial Sequence: targeting sequence/synthetic sequence
IITMPTESDFLMQVDGKPKC

SEQ ID NO: 8076 - protein, 20 aa, Artificial Sequence
  Description of Artificial Sequence: targeting sequence/synthetic sequence
PPPWSPSSPPHSTGSVRPVR

SEQ ID NO: 8077 - protein, 20 aa, Artificial Sequence
  Description of Artificial Sequence: targeting sequence/synthetic sequence
TETGVKMSSEFEVEGAFKMG

SEQ ID NO: 8078 - protein, 20 aa, Artificial Sequence
  Description of Artificial Sequence: targeting sequence/synthetic sequence
KKTSFKGDSGGPLVCNKVAQ

SEQ ID NO: 8079 - protein, 20 aa, Artificial Sequence
  Description of Artificial Sequence: targeting sequence/synthetic sequence
KDLKKSFKSPEPRLFTPEEF

SEQ ID NO: 8080 - protein, 20 aa, Artificial Sequence
  Description of Artificial Sequence: targeting sequence/synthetic sequence
LREIRRYQKSTELLIRKLPF

SEQ ID NO: 8081 - protein, 20 aa, Artificial Sequence
  Description of Artificial Sequence: targeting sequence/synthetic sequence
GERGAPGPAGPRGAAGEPGR

SEQ ID NO: 8082 - protein, 20 aa, Artificial Sequence
  Description of Artificial Sequence: targeting sequence/synthetic sequence
LSWGSMGLEAATAVGLSDFC

SEQ ID NO: 8083 - protein, 20 aa, Artificial Sequence
  Description of Artificial Sequence: targeting sequence/synthetic sequence
KDGKKRKRSRKESYSVYVYK

SEQ ID NO: 8084 - protein, 20 aa, Artificial Sequence
  Description of Artificial Sequence: targeting sequence/synthetic sequence
ANTHSSAKPCGQQSIHLGGV

SEQ ID NO: 8085 - protein, 20 aa, Artificial Sequence
  Description of Artificial Sequence: targeting sequence/synthetic sequence
TQVAEQLINPFGEDDDDFET

SEQ ID NO: 8086 - protein, 20 aa, Artificial Sequence
  Description of Artificial Sequence: targeting sequence/synthetic sequence
PDSQPCSLVPGLVPPAPRAT

SEQ ID NO: 8087 - protein, 20 aa, Artificial Sequence
  Description of Artificial Sequence: targeting sequence/synthetic sequence
CEIDWNEGKNVTLKTIKKKQ

SEQ ID NO: 8088 - protein, 20 aa, Artificial Sequence
  Description of Artificial Sequence: targeting sequence/synthetic sequence
TLVQLLGSDDINVVTCAAGI

SEQ ID NO: 8089 - protein, 20 aa, Artificial Sequence
  Description of Artificial Sequence: targeting sequence/synthetic sequence
GQILSKLKLTSPPEDYPEPE

SEQ ID NO: 8090 - protein, 20 aa, Artificial Sequence
  Description of Artificial Sequence: targeting sequence/synthetic sequence
GISVPGPMGPSGPRGLPGPP

SEQ ID NO: 8091 - protein, 20 aa, Artificial Sequence
  Description of Artificial Sequence: targeting sequence/synthetic sequence
AQHRSHRQMATTTNPLIRHE

SEQ ID NO: 8092 - protein, 20 aa, Artificial Sequence
  Description of Artificial Sequence: targeting sequence/synthetic sequence
GPAGFAGPPGADGQPGAKGE

SEQ ID NO: 8093 - protein, 20 aa, Artificial Sequence
  Description of Artificial Sequence: targeting sequence/synthetic sequence
QHRSHRQMATTTNPLIRHEN

SEQ ID NO: 8094 - protein, 20 aa, Artificial Sequence
  Description of Artificial Sequence: targeting sequence/synthetic sequence
GENADSQIKLSIKRLVTTGV

SEQ ID NO: 8095 - protein, 20 aa, Artificial Sequence
  Description of Artificial Sequence: targeting sequence/synthetic sequence
VPPDAMNRRIMNVHEAVNCL

SEQ ID NO: 8096 - protein, 20 aa, Artificial Sequence
  Description of Artificial Sequence: targeting sequence/synthetic sequence
LTFQQNASSMCVPDQDTAIR

SEQ ID NO: 8097 - protein, 20 aa, Artificial Sequence
  Description of Artificial Sequence: targeting sequence/synthetic sequence
SPGCWIIDNNICDQSCQNFI

SEQ ID NO: 8098 - protein, 20 aa, Artificial Sequence
  Description of Artificial Sequence: targeting sequence/synthetic sequence
PDLATSPTKSPFKIPPVTFI

SEQ ID NO: 8099 - protein, 20 aa, Artificial Sequence
  Description of Artificial Sequence: targeting sequence/synthetic sequence
VRCDQFLPKTDSILSDPTDH

SEQ ID NO: 8100 - protein, 20 aa, Artificial Sequence
  Description of Artificial Sequence: targeting sequence/synthetic sequence
HLARAPNHAVVTRKDKEACV

SEQ ID NO: 8101 - protein, 20 aa, Artificial Sequence
  Description of Artificial Sequence: targeting sequence/synthetic sequence
VRNPKILILDEATSALDSES

SEQ ID NO: 8102 - protein, 20 aa, Artificial Sequence
  Description of Artificial Sequence: targeting sequence/synthetic sequence
PSGPRGLPGPPGAPGPQGFQ

SEQ ID NO: 8103 - protein, 20 aa, Artificial Sequence
  Description of Artificial Sequence: targeting sequence/synthetic sequence
SLWPDTAVAPGPPPGPPRVS

SEQ ID NO: 8104 - protein, 20 aa, Artificial Sequence
  Description of Artificial Sequence: targeting sequence/synthetic sequence
VESELIKPINPRLDGCIRSW

SEQ ID NO: 8105 - protein, 20 aa, Artificial Sequence
  Description of Artificial Sequence: targeting sequence/synthetic sequence
VTAGVAIAKTIRLESEVTAI

SEQ ID NO: 8106 - protein, 20 aa, Artificial Sequence
  Description of Artificial Sequence: targeting sequence/synthetic sequence
DHRGLTFQQNASSMCVPDQD

SEQ ID NO: 8107 - protein, 20 aa, Artificial Sequence
  Description of Artificial Sequence: targeting sequence/synthetic sequence
DTAVAPGPPPGPPRVSPDPR

SEQ ID NO: 8108 - protein, 20 aa, Artificial Sequence
  Description of Artificial Sequence: targeting sequence/synthetic sequence
KKDGRKRKRSRKESYSVYVY

SEQ ID NO: 8109 - protein, 20 aa, Artificial Sequence
  Description of Artificial Sequence: targeting sequence/synthetic sequence
ARGSDGQPGPPGPPGTAGFP

SEQ ID NO: 8110 - protein, 20 aa, Artificial Sequence
  Description of Artificial Sequence: targeting sequence/synthetic sequence
EYKCKVSNKGLPSSIEKTIS

SEQ ID NO: 8111 - protein, 20 aa, Artificial Sequence
  Description of Artificial Sequence: targeting sequence/synthetic sequence
AQTTQPTATEAQTTPLAAME

SEQ ID NO: 8112 - protein, 20 aa, Artificial Sequence
  Description of Artificial Sequence: targeting sequence/synthetic sequence
PPTEFIREGDDDRTVCREIR

SEQ ID NO: 8113 - protein, 20 aa, Artificial Sequence
  Description of Artificial Sequence: targeting sequence/synthetic sequence
GLSDPWADSVGVRPRTTERH

SEQ ID NO: 8114 - protein, 20 aa, Artificial Sequence
  Description of Artificial Sequence: targeting sequence/synthetic sequence
RCSDGWSFDATTLDDNGTML

SEQ ID NO: 8115 - protein, 20 aa, Artificial Sequence
  Description of Artificial Sequence: targeting sequence/synthetic sequence
QYWEYQFQHQPSQEECEGSS

SEQ ID NO: 8116 - protein, 20 aa, Artificial Sequence
  Description of Artificial Sequence: targeting sequence/synthetic sequence
QLLGSDDINVVTCAAGILSN

SEQ ID NO: 8117 - protein, 20 aa, Artificial Sequence
  Description of Artificial Sequence: targeting sequence/synthetic sequence
VEGRCSERDARLGLCARSND

SEQ ID NO: 8118 - protein, 20 aa, Artificial Sequence
  Description of Artificial Sequence: targeting sequence/synthetic sequence
GVHGLASSNETFDGLDCPAA

SEQ ID NO: 8119 - protein, 20 aa, Artificial Sequence
  Description of Artificial Sequence: targeting sequence/synthetic sequence
CCDVEDSTTCFNAKGPLLKK

SEQ ID NO: 8120 - protein, 20 aa, Artificial Sequence
  Description of Artificial Sequence: targeting sequence/synthetic sequence
GPTGTGESKCPLMVKVLDAV

SEQ ID NO: 8121 - protein, 20 aa, Artificial Sequence
  Description of Artificial Sequence: targeting sequence/synthetic sequence
GCQKILKVLAPLVPTGSENL

SEQ ID NO: 8122 - protein, 20 aa, Artificial Sequence
  Description of Artificial Sequence: targeting sequence/synthetic sequence
PSVGAAAGPVVPPCPGRIRH

SEQ ID NO: 8123 - protein, 20 aa, Artificial Sequence
  Description of Artificial Sequence: targeting sequence/synthetic sequence
AAALATPDTLQGQCSAFVQL

SEQ ID NO: 8124 - protein, 20 aa, Artificial Sequence
  Description of Artificial Sequence: targeting sequence/synthetic sequence
EGGTGPPGPPLTTRTKCADP

SEQ ID NO: 8125 - protein, 20 aa, Artificial Sequence
  Description of Artificial Sequence: targeting sequence/synthetic sequence
AEGCGLPPKALHTATFQALQ

SEQ ID NO: 8126 - protein, 20 aa, Artificial Sequence
  Description of Artificial Sequence: targeting sequence/synthetic sequence
SGEPGAPGSKGDTGAKGEPG

SEQ ID NO: 8127 - protein, 20 aa, Artificial Sequence
  Description of Artificial Sequence: targeting sequence/synthetic sequence
LEKMLVLDSDKRITAAQALA

SEQ ID NO: 8128 - protein, 20 aa, Artificial Sequence
  Description of Artificial Sequence: targeting sequence/synthetic sequence
NDGATGAAGPPGPTGPAGPP

SEQ ID NO: 8129 - protein, 20 aa, Artificial Sequence
  Description of Artificial Sequence: targeting sequence/synthetic sequence
PPSILDPPDQVQFEKCGKRV

SEQ ID NO: 8130 - protein, 20 aa, Artificial Sequence
  Description of Artificial Sequence: targeting sequence/synthetic sequence
IKSKNILVKKCETCAIADLG

SEQ ID NO: 8131 - protein, 20 aa, Artificial Sequence
  Description of Artificial Sequence: targeting sequence/synthetic sequence
ESSPDPATLSKEDARLLLAA

SEQ ID NO: 8132 - protein, 20 aa, Artificial Sequence
  Description of Artificial Sequence: targeting sequence/synthetic sequence
LPPKKKRLRLADMEHSSGES

SEQ ID NO: 8133 - protein, 20 aa, Artificial Sequence
  Description of Artificial Sequence: targeting sequence/synthetic sequence
TNSTLKATEIDQLVCRDKLS

SEQ ID NO: 8134 - protein, 20 aa, Artificial Sequence
  Description of Artificial Sequence: targeting sequence/synthetic sequence
LRAANTHSSAKPCGQQSIHL

SEQ ID NO: 8135 - protein, 20 aa, Artificial Sequence
  Description of Artificial Sequence: targeting sequence/synthetic sequence
SWGSMGLEAATAVGLSDFCS

SEQ ID NO: 8136 - protein, 20 aa, Artificial Sequence
  Description of Artificial Sequence: targeting sequence/synthetic sequence
VCGSDGVTYSTECELKKARC

SEQ ID NO: 8137 - protein, 20 aa, Artificial Sequence
  Description of Artificial Sequence: targeting sequence/synthetic sequence
HRKGCDTLDISVPPGSRNLP

SEQ ID NO: 8138 - protein, 20 aa, Artificial Sequence
  Description of Artificial Sequence: targeting sequence/synthetic sequence
SSHILTPTRFLDDLKALDKK

SEQ ID NO: 8139 - protein, 20 aa, Artificial Sequence
  Description of Artificial Sequence: targeting sequence/synthetic sequence
YQNLSPVGSGAYGSVCAAFD

SEQ ID NO: 8140 - protein, 20 aa, Artificial Sequence
  Description of Artificial Sequence: targeting sequence/synthetic sequence
STVTPAPSDASGIWEPGSQV

SEQ ID NO: 8141 - protein, 20 aa, Artificial Sequence
  Description of Artificial Sequence: targeting sequence/synthetic sequence
RSPGPHCAQTEVIATLKNGK

SEQ ID NO: 8142 - protein, 20 aa, Artificial Sequence
  Description of Artificial Sequence: targeting sequence/synthetic sequence
GQGTTVTVSSAPTKAPDVFP

SEQ ID NO: 8143 - protein, 20 aa, Artificial Sequence
  Description of Artificial Sequence: targeting sequence/synthetic sequence
MQTREVLMKLSGTIECEGPN

SEQ ID NO: 8144 - protein, 20 aa, Artificial Sequence
  Description of Artificial Sequence: targeting sequence/synthetic sequence
PTRTAEPAESSVPPVTSIGI

SEQ ID NO: 8145 - protein, 20 aa, Artificial Sequence
  Description of Artificial Sequence: targeting sequence/synthetic sequence
KMSSEFEVEGAFKMGGEFSL

SEQ ID NO: 8146 - protein, 20 aa, Artificial Sequence
  Description of Artificial Sequence: targeting sequence/synthetic sequence
RDHMKSVIPSDGPSVACVKK

SEQ ID NO: 8147 - protein, 20 aa, Artificial Sequence
  Description of Artificial Sequence: targeting sequence/synthetic sequence
FEPSEAEISHTQKATLVCLA

SEQ ID NO: 8148 - protein, 20 aa, Artificial Sequence
  Description of Artificial Sequence: targeting sequence/synthetic sequence
GSGGTYALSLSQYNMGINIE

SEQ ID NO: 8149 - protein, 20 aa, Artificial Sequence
  Description of Artificial Sequence: targeting sequence/synthetic sequence
SHRKGCDTLDISVPPGSRNL

SEQ ID NO: 8150 - protein, 20 aa, Artificial Sequence
  Description of Artificial Sequence: targeting sequence/synthetic sequence
SLNEEQDKRLVCKHSMVDRG

SEQ ID NO: 8151 - protein, 20 aa, Artificial Sequence
  Description of Artificial Sequence: targeting sequence/synthetic sequence
QGTVVCSLDGLFPVSEAQVH

SEQ ID NO: 8152 - protein, 20 aa, Artificial Sequence
  Description of Artificial Sequence: targeting sequence/synthetic sequence
PGDGGTGRPGPPLISRTKCA

SEQ ID NO: 8153 - protein, 20 aa, Artificial Sequence
  Description of Artificial Sequence: targeting sequence/synthetic sequence
QKCLAVGMVKEVVRTDSLKG

SEQ ID NO: 8154 - protein, 20 aa, Artificial Sequence
  Description of Artificial Sequence: targeting sequence/synthetic sequence
KKEFPYPCYDPATREGDLKL

SEQ ID NO: 8155 - protein, 20 aa, Artificial Sequence
  Description of Artificial Sequence: targeting sequence/synthetic sequence
TQGEDQYYLRVTTVASHTSD

SEQ ID NO: 8156 - protein, 20 aa, Artificial Sequence
  Description of Artificial Sequence: targeting sequence/synthetic sequence
GILSDLLCGYPEGGGSRVLS

SEQ ID NO: 8157 - protein, 20 aa, Artificial Sequence
  Description of Artificial Sequence: targeting sequence/synthetic sequence
DQDFYQKFATGSVPIPWQNE

SEQ ID NO: 8158 - protein, 20 aa, Artificial Sequence
  Description of Artificial Sequence: targeting sequence/synthetic sequence
KKRRKLGAEEAARAVDDGGC

SEQ ID NO: 8159 - protein, 20 aa, Artificial Sequence
  Description of Artificial Sequence: targeting sequence/synthetic sequence
GIPGVKGEAGLPGTPGPTGP

SEQ ID NO: 8160 - protein, 20 aa, Artificial Sequence
  Description of Artificial Sequence: targeting sequence/synthetic sequence
KGSRGDPGTPGVPGKDGQAG

SEQ ID NO: 8161 - protein, 20 aa, Artificial Sequence
  Description of Artificial Sequence: targeting sequence/synthetic sequence
DPGEILGHVPGMLLKGERGF

SEQ ID NO: 8162 - protein, 20 aa, Artificial Sequence
  Description of Artificial Sequence: targeting sequence/synthetic sequence
KACDVLEIPYVTKQGDSWLK

SEQ ID NO: 8163 - protein, 20 aa, Artificial Sequence
  Description of Artificial Sequence: targeting sequence/synthetic sequence
TADMQTREVLMKLSGTIECE

SEQ ID NO: 8164 - protein, 20 aa, Artificial Sequence
  Description of Artificial Sequence: targeting sequence/synthetic sequence
STQEEIKKRKKAVLFCLSDD

SEQ ID NO: 8165 - protein, 20 aa, Artificial Sequence
  Description of Artificial Sequence: targeting sequence/synthetic sequence
QRDRKAEHWKHKKEESGRER

SEQ ID NO: 8166 - protein, 20 aa, Artificial Sequence
  Description of Artificial Sequence: targeting sequence/synthetic sequence
HSDAVPDAPILPVSPIWEPP

SEQ ID NO: 8167 - protein, 20 aa, Artificial Sequence
  Description of Artificial Sequence: targeting sequence/synthetic sequence
GCFIAIDTMLDMAENEGVVD

SEQ ID NO: 8168 - protein, 20 aa, Artificial Sequence
  Description of Artificial Sequence: targeting sequence/synthetic sequence
GGEGGAGADEEKEQSHRPFL

SEQ ID NO: 8169 - protein, 20 aa, Artificial Sequence
  Description of Artificial Sequence: targeting sequence/synthetic sequence
EIPHVMRQGDGWMKKFTEAC

SEQ ID NO: 8170 - protein, 20 aa, Artificial Sequence
  Description of Artificial Sequence: targeting sequence/synthetic sequence
RVHRLLRKGNYSERVGAGAP

SEQ ID NO: 8171 - protein, 20 aa, Artificial Sequence
  Description of Artificial Sequence: targeting sequence/synthetic sequence
GNPAKHDLDIKPTVISHRLH

SEQ ID NO: 8172 - protein, 20 aa, Artificial Sequence
  Description of Artificial Sequence: targeting sequence/synthetic sequence
TDDTAVYYCVRDLEGAGKYD

SEQ ID NO: 8173 - protein, 20 aa, Artificial Sequence
  Description of Artificial Sequence: targeting sequence/synthetic sequence
TPSWTLSPFQDAASSSSSSS

SEQ ID NO: 8174 - protein, 20 aa, Artificial Sequence
  Description of Artificial Sequence: targeting sequence/synthetic sequence
LQTGTKELISLHNTVATLYC

SEQ ID NO: 8175 - protein, 20 aa, Artificial Sequence
  Description of Artificial Sequence: targeting sequence/synthetic sequence
GPGSDGKPGPPGSQGESGRP

SEQ ID NO: 8176 - protein, 20 aa, Artificial Sequence
  Description of Artificial Sequence: targeting sequence/synthetic sequence
PPPSEELALNELVTLTCLAR

SEQ ID NO: 8177 - protein, 20 aa, Artificial Sequence
  Description of Artificial Sequence: targeting sequence/synthetic sequence
ERARCTVADTMRTGPSNSAS

SEQ ID NO: 8178 - protein, 20 aa, Artificial Sequence
  Description of Artificial Sequence: targeting sequence/synthetic sequence
EKNGSCFLRTDQLDGETDWK

SEQ ID NO: 8179 - protein, 20 aa, Artificial Sequence
  Description of Artificial Sequence: targeting sequence/synthetic sequence
LHDSTPSWTLSPFQDAASSS

SEQ ID NO: 8180 - protein, 20 aa, Artificial Sequence
  Description of Artificial Sequence: targeting sequence/synthetic sequence
PGVPGAKGEDGKDGSPGEPG

SEQ ID NO: 8181 - protein, 20 aa, Artificial Sequence
  Description of Artificial Sequence: targeting sequence/synthetic sequence
RPGTQALEPGAATEAEGFPG

SEQ ID NO: 8182 - protein, 20 aa, Artificial Sequence
  Description of Artificial Sequence: targeting sequence/synthetic sequence
VECPPCPAPPVAGPSVFLFP

SEQ ID NO: 8183 - protein, 20 aa, Artificial Sequence
  Description of Artificial Sequence: targeting sequence/synthetic sequence
SGGKLDEWEKIQLRPGGKKR

SEQ ID NO: 8184 - protein, 20 aa, Artificial Sequence
  Description of Artificial Sequence: targeting sequence/synthetic sequence
EQLGPVTQEFWDNLEKETEG

SEQ ID NO: 8185 - protein, 20 aa, Artificial Sequence
  Description of Artificial Sequence: targeting sequence/synthetic sequence
CRQILGQLQPALQTGSEELK

SEQ ID NO: 8186 - protein, 20 aa, Artificial Sequence
  Description of Artificial Sequence: targeting sequence/synthetic sequence
PPPIARAVVPSKRQRVSGNT

SEQ ID NO: 8187 - protein, 20 aa, Artificial Sequence
  Description of Artificial Sequence: targeting sequence/synthetic sequence
VCSSNKPAIVEAGGMQALGL

SEQ ID NO: 8188 - protein, 20 aa, Artificial Sequence
  Description of Artificial Sequence: targeting sequence/synthetic sequence
ETRGVLKVFLENVIRDAVTY

SEQ ID NO: 8189 - protein, 20 aa, Artificial Sequence
  Description of Artificial Sequence: targeting sequence/synthetic sequence
TATCTAKNAHLVTRNQDIHV

SEQ ID NO: 8190 - protein, 20 aa, Artificial Sequence
  Description of Artificial Sequence: targeting sequence/synthetic sequence
EKIRLRPGGRKKYRLKHLVW

SEQ ID NO: 8191 - protein, 20 aa, Artificial Sequence
  Description of Artificial Sequence: targeting sequence/synthetic sequence
RAIVDVHFDPTTAFRAPDVA

SEQ ID NO: 8192 - protein, 20 aa, Artificial Sequence
  Description of Artificial Sequence: targeting sequence/synthetic sequence
STKKRERDEENQEMSSCKSA

SEQ ID NO: 8193 - protein, 20 aa, Artificial Sequence
  Description of Artificial Sequence: targeting sequence/synthetic sequence
EIPEAQIHEGFQELLRTLNQ

SEQ ID NO: 8194 - protein, 20 aa, Artificial Sequence
  Description of Artificial Sequence: targeting sequence/synthetic sequence
TGFVDIPKQEKALMKAVATV

SEQ ID NO: 8195 - protein, 20 aa, Artificial Sequence
  Description of Artificial Sequence: targeting sequence/synthetic sequence
LSLGPEEKGTSGVQKKICTE

SEQ ID NO: 8196 - protein, 20 aa, Artificial Sequence
  Description of Artificial Sequence: targeting sequence/synthetic sequence
GGGDVEDVTPRPGGCQISGR

SEQ ID NO: 8197 - protein, 20 aa, Artificial Sequence
  Description of Artificial Sequence: targeting sequence/synthetic sequence
KLTEDRWNKPQKTKGRRGSH

SEQ ID NO: 8198 - protein, 20 aa, Artificial Sequence
  Description of Artificial Sequence: targeting sequence/synthetic sequence
TDVPTATKRWGFRAGVPPKV

SEQ ID NO: 8199 - protein, 20 aa, Artificial Sequence
  Description of Artificial Sequence: targeting sequence/synthetic sequence
GGSPGITGSKGDMGPPGVPG

SEQ ID NO: 8200 - protein, 20 aa, Artificial Sequence
  Description of Artificial Sequence: targeting sequence/synthetic sequence
SEAGPTGTGESKCPLMVKVL

SEQ ID NO: 8201 - protein, 20 aa, Artificial Sequence
  Description of Artificial Sequence: targeting sequence/synthetic sequence
VELEPTDQDFYQKFATGSVP

SEQ ID NO: 8202 - protein, 20 aa, Artificial Sequence
  Description of Artificial Sequence: targeting sequence/synthetic sequence
EKMMESSFVGPQSFPEVPSP

SEQ ID NO: 8203 - protein, 20 aa, Artificial Sequence
  Description of Artificial Sequence: targeting sequence/synthetic sequence
DSAVDMDECKEPDVCKHGQC

SEQ ID NO: 8204 - protein, 20 aa, Artificial Sequence
  Description of Artificial Sequence: targeting sequence/synthetic sequence
KKRKRGRKESYSIYVYKVLK

SEQ ID NO: 8205 - protein, 20 aa, Artificial Sequence
  Description of Artificial Sequence: targeting sequence/synthetic sequence
ELPQDGTSTLRENSKPEESH

SEQ ID NO: 8206 - protein, 20 aa, Artificial Sequence
  Description of Artificial Sequence: targeting sequence/synthetic sequence
EAYECKGGCFFPLADDVTPT

SEQ ID NO: 8207 - protein, 20 aa, Artificial Sequence
  Description of Artificial Sequence: targeting sequence/synthetic sequence
DVSKKVTELLRTFCESKRLT

SEQ ID NO: 8208 - protein, 20 aa, Artificial Sequence
  Description of Artificial Sequence: targeting sequence/synthetic sequence
SQTGLAEQCAGIRKRPATDD

SEQ ID NO: 8209 - protein, 20 aa, Artificial Sequence
  Description of Artificial Sequence: targeting sequence/synthetic sequence
IIFGPGPVLSDNFTDSMIMN

SEQ ID NO: 8210 - protein, 20 aa, Artificial Sequence
  Description of Artificial Sequence: targeting sequence/synthetic sequence
GADGGPSGFPERGGNGSLPG

SEQ ID NO: 8211 - protein, 20 aa, Artificial Sequence
  Description of Artificial Sequence: targeting sequence/synthetic sequence
QPGIGFPGPPGPKGVDGLPG

SEQ ID NO: 8212 - protein, 20 aa, Artificial Sequence
  Description of Artificial Sequence: targeting sequence/synthetic sequence
CGFGAVCEPNAEGPGRASCV

SEQ ID NO: 8213 - protein, 20 aa, Artificial Sequence
  Description of Artificial Sequence: targeting sequence/synthetic sequence
CVDKLTKVYKDDKKLALNKL

SEQ ID NO: 8214 - protein, 20 aa, Artificial Sequence
  Description of Artificial Sequence: targeting sequence/synthetic sequence
KRPHVFESNPSIRKRQQTRL

SEQ ID NO: 8215 - protein, 20 aa, Artificial Sequence
  Description of Artificial Sequence: targeting sequence/synthetic sequence
TPTRTAEPAESSVPPVTSIG

SEQ ID NO: 8216 - protein, 20 aa, Artificial Sequence
  Description of Artificial Sequence: targeting sequence/synthetic sequence
GSTSETPQPPRKKRARVDPT

SEQ ID NO: 8217 - protein, 20 aa, Artificial Sequence
  Description of Artificial Sequence: targeting sequence/synthetic sequence
LTEDRWNKPQKTKGHRRSHT

SEQ ID NO: 8218 - protein, 20 aa, Artificial Sequence
  Description of Artificial Sequence: targeting sequence/synthetic sequence
GSGKPIDKGPVVMAEDFLDI

SEQ ID NO: 8219 - protein, 20 aa, Artificial Sequence
  Description of Artificial Sequence: targeting sequence/synthetic sequence
KADELEKIRLRPGGKKKYKL

SEQ ID NO: 8220 - protein, 20 aa, Artificial Sequence
  Description of Artificial Sequence: targeting sequence/synthetic sequence
GVTGLVGIPGPPGIPGFDGA

SEQ ID NO: 8221 - protein, 20 aa, Artificial Sequence
  Description of Artificial Sequence: targeting sequence/synthetic sequence
ISPPDAASAAPLRTITADTF

SEQ ID NO: 8222 - protein, 20 aa, Artificial Sequence
  Description of Artificial Sequence: targeting sequence/synthetic sequence
SPEPPDTTSPEPPNTTSPES

SEQ ID NO: 8223 - protein, 20 aa, Artificial Sequence
  Description of Artificial Sequence: targeting sequence/synthetic sequence
GDLAVEVSPGCWIIDNNICD

SEQ ID NO: 8224 - protein, 20 aa, Artificial Sequence
  Description of Artificial Sequence: targeting sequence/synthetic sequence
HSTESRCCRYPLTVDFEAFG

SEQ ID NO: 8225 - protein, 20 aa, Artificial Sequence
  Description of Artificial Sequence: targeting sequence/synthetic sequence
VLKVFLENVIRDAVTYTEHA

SEQ ID NO: 8226 - protein, 20 aa, Artificial Sequence
  Description of Artificial Sequence: targeting sequence/synthetic sequence
ELLIRKLPFQRLVREIAQDF

SEQ ID NO: 8227 - protein, 20 aa, Artificial Sequence
  Description of Artificial Sequence: targeting sequence/synthetic sequence
DTKSYWKALGISPFHEHAEV

SEQ ID NO: 8228 - protein, 20 aa, Artificial Sequence
  Description of Artificial Sequence: targeting sequence/synthetic sequence
ESQSDDPHFHEKKQIPCVVS

SEQ ID NO: 8229 - protein, 20 aa, Artificial Sequence
  Description of Artificial Sequence: targeting sequence/synthetic sequence
KNNYLREEECILACRGVQGP

SEQ ID NO: 8230 - protein, 20 aa, Artificial Sequence
  Description of Artificial Sequence: targeting sequence/synthetic sequence
GLQFPVGRVHRLLRKGNYAE

SEQ ID NO: 8231 - protein, 20 aa, Artificial Sequence
  Description of Artificial Sequence: targeting sequence/synthetic sequence
HTWSLERSESLTSDSQSGIM

SEQ ID NO: 8232 - protein, 20 aa, Artificial Sequence
  Description of Artificial Sequence: targeting sequence/synthetic sequence
GPEEKGTSGVQKKICTERLG

SEQ ID NO: 8233 - protein, 20 aa, Artificial Sequence
  Description of Artificial Sequence: targeting sequence/synthetic sequence
RDIKSKNILVKKCETCAIAD

SEQ ID NO: 8234 - protein, 20 aa, Artificial Sequence
  Description of Artificial Sequence: targeting sequence/synthetic sequence
TLTIQTHPYRTCDPVEMSYP

SEQ ID NO: 8235 - protein, 20 aa, Artificial Sequence
  Description of Artificial Sequence: targeting sequence/synthetic sequence
NLEKNSTKQEILAALEKGCS

SEQ ID NO: 8236 - protein, 20 aa, Artificial Sequence
  Description of Artificial Sequence: targeting sequence/synthetic sequence
GPSHPRLDPEEIQMADYISK

SEQ ID NO: 8237 - protein, 20 aa, Artificial Sequence
  Description of Artificial Sequence: targeting sequence/synthetic sequence
GTCPSKTFGGFDSTKDLPDD

SEQ ID NO: 8238 - protein, 20 aa, Artificial Sequence
  Description of Artificial Sequence: targeting sequence/synthetic sequence
EMTVFREPTAISAMELSTKQ

SEQ ID NO: 8239 - protein, 20 aa, Artificial Sequence
  Description of Artificial Sequence: targeting sequence/synthetic sequence
LAVTFPGPGEDGLNPFLEVK

SEQ ID NO: 8240 - protein, 20 aa, Artificial Sequence
  Description of Artificial Sequence: targeting sequence/synthetic sequence
MAVLAAGALTQPVPPADPAG

SEQ ID NO: 8241 - protein, 20 aa, Artificial Sequence
  Description of Artificial Sequence: targeting sequence/synthetic sequence
CAAEEPPRFIKEPKDQIGVS

SEQ ID NO: 8242 - protein, 20 aa, Artificial Sequence
  Description of Artificial Sequence: targeting sequence/synthetic sequence
TQGRLCNKTSEGMDGCELMC

SEQ ID NO: 8243 - protein, 20 aa, Artificial Sequence
  Description of Artificial Sequence: targeting sequence/synthetic sequence
VDRGWGNGCGLFGKGGIVTC

SEQ ID NO: 8244 - protein, 20 aa, Artificial Sequence
  Description of Artificial Sequence: targeting sequence/synthetic sequence
EAKTSEAPSTQDPSTQASTA

SEQ ID NO: 8245 - protein, 20 aa, Artificial Sequence
  Description of Artificial Sequence: targeting sequence/synthetic sequence
LSDGVAVLKVGGTSDVEVNE

SEQ ID NO: 8246 - protein, 20 aa, Artificial Sequence
  Description of Artificial Sequence: targeting sequence/synthetic sequence
AQTTRLTATEAQTTPLAATE

SEQ ID NO: 8247 - protein, 20 aa, Artificial Sequence
  Description of Artificial Sequence: targeting sequence/synthetic sequence
PSTKKRERDEENQEMSSCKS

SEQ ID NO: 8248 - protein, 20 aa, Artificial Sequence
  Description of Artificial Sequence: targeting sequence/synthetic sequence
WSTSTETGVKMSSEFEVEGA

SEQ ID NO: 8249 - protein, 20 aa, Artificial Sequence
  Description of Artificial Sequence: targeting sequence/synthetic sequence
GVSTSAPLSPTSGTSVGMST

SEQ ID NO: 8250 - protein, 20 aa, Artificial Sequence
  Description of Artificial Sequence: targeting sequence/synthetic sequence
EESCAEAQDGELDGLWTTIT

SEQ ID NO: 8251 - protein, 20 aa, Artificial Sequence
  Description of Artificial Sequence: targeting sequence/synthetic sequence
LAAGALTQPVPPADPAGSGL

SEQ ID NO: 8252 - protein, 20 aa, Artificial Sequence
  Description of Artificial Sequence: targeting sequence/synthetic sequence
AVCEPNAEGPGRASCVCKKS

SEQ ID NO: 8253 - protein, 20 aa, Artificial Sequence
  Description of Artificial Sequence: targeting sequence/synthetic sequence
TVFREPTAISAMELSTKQQQ

SEQ ID NO: 8254 - protein, 20 aa, Artificial Sequence
  Description of Artificial Sequence: targeting sequence/synthetic sequence
QETYKKVMNWKETLTFPPEV

SEQ ID NO: 8255 - protein, 20 aa, Artificial Sequence
  Description of Artificial Sequence: targeting sequence/synthetic sequence
GLKGERGPPGGVGFPGSRGD

SEQ ID NO: 8256 - protein, 20 aa, Artificial Sequence
  Description of Artificial Sequence: targeting sequence/synthetic sequence
EKIKKKDPKCIFACEEMSGE

SEQ ID NO: 8257 - protein, 20 aa, Artificial Sequence
  Description of Artificial Sequence: targeting sequence/synthetic sequence
TPTLRNGLEENFCRNPDGDP

SEQ ID NO: 8258 - protein, 20 aa, Artificial Sequence
  Description of Artificial Sequence: targeting sequence/synthetic sequence
EKNNSRIKLGLKSLVSKGTL

SEQ ID NO: 8259 - protein, 20 aa, Artificial Sequence
  Description of Artificial Sequence: targeting sequence/synthetic sequence
LVGGCAAEEPPRFIKEPKDQ

SEQ ID NO: 8260 - protein, 20 aa, Artificial Sequence
  Description of Artificial Sequence: targeting sequence/synthetic sequence
FNGSGKPIDKGPVVMAEDFL

SEQ ID NO: 8261 - protein, 20 aa, Artificial Sequence
  Description of Artificial Sequence: targeting sequence/synthetic sequence
ILEIASNIQPQNVDSVCSGT

SEQ ID NO: 8262 - protein, 20 aa, Artificial Sequence
  Description of Artificial Sequence: targeting sequence/synthetic sequence
FGQGSGPIMLDEVQCTGTEA

SEQ ID NO: 8263 - protein, 20 aa, Artificial Sequence
  Description of Artificial Sequence: targeting sequence/synthetic sequence
CYNISVTDPSGKSLLLDPPT

SEQ ID NO: 8264 - protein, 20 aa, Artificial Sequence
  Description of Artificial Sequence: targeting sequence/synthetic sequence
VYADAAPDLFDFLDSSVTTA

SEQ ID NO: 8265 - protein, 20 aa, Artificial Sequence
  Description of Artificial Sequence: targeting sequence/synthetic sequence
EGCRQILGQLQPSLKTGSEE

SEQ ID NO: 8266 - protein, 20 aa, Artificial Sequence
  Description of Artificial Sequence: targeting sequence/synthetic sequence
EKGEAGPPGPPGIVIGTGPL

SEQ ID NO: 8267 - protein, 20 aa, Artificial Sequence
  Description of Artificial Sequence: targeting sequence/synthetic sequence
EAEISHTQKATLVCLATGFY

SEQ ID NO: 8268 - protein, 20 aa, Artificial Sequence
  Description of Artificial Sequence: targeting sequence/synthetic sequence
LSQGLVCPMSVDQKDTTPYS

SEQ ID NO: 8269 - protein, 20 aa, Artificial Sequence
  Description of Artificial Sequence: targeting sequence/synthetic sequence
EMKNPEASKLNKRDGCSSGG

SEQ ID NO: 8270 - protein, 20 aa, Artificial Sequence
  Description of Artificial Sequence: targeting sequence/synthetic sequence
SRGLSDPWADSVGVRPRTTE

SEQ ID NO: 8271 - protein, 20 aa, Artificial Sequence
  Description of Artificial Sequence: targeting sequence/synthetic sequence
KCEIALEKLKNDMAVPTPPP

SEQ ID NO: 8272 - protein, 20 aa, Artificial Sequence
  Description of Artificial Sequence: targeting sequence/synthetic sequence
DIDGYRGPPGPQGPPGEIGF

SEQ ID NO: 8273 - protein, 20 aa, Artificial Sequence
  Description of Artificial Sequence: targeting sequence/synthetic sequence
CKEFHPDKGGDEEKMKKMNT

SEQ ID NO: 8274 - protein, 20 aa, Artificial Sequence
  Description of Artificial Sequence: targeting sequence/synthetic sequence
AQTTPPAAMEAQTTQTTAME

SEQ ID NO: 8275 - protein, 20 aa, Artificial Sequence
  Description of Artificial Sequence: targeting sequence/synthetic sequence
LPFDEDYIIEIKPFSDGGDG

SEQ ID NO: 8276 - protein, 20 aa, Artificial Sequence
  Description of Artificial Sequence: targeting sequence/synthetic sequence
GQPGSPGSPGPPGICESCPT

SEQ ID NO: 8277 - protein, 20 aa, Artificial Sequence
  Description of Artificial Sequence: targeting sequence/synthetic sequence
PGKNGETGPQGPPGPTGPGG

SEQ ID NO: 8278 - protein, 20 aa, Artificial Sequence
  Description of Artificial Sequence: targeting sequence/synthetic sequence
VSPIWEPPPATTSTTPVLSS

SEQ ID NO: 8279 - protein, 20 aa, Artificial Sequence
  Description of Artificial Sequence: targeting sequence/synthetic sequence
VDECSLKPSICGTAVCKNIP

SEQ ID NO: 8280 - protein, 20 aa, Artificial Sequence
  Description of Artificial Sequence: targeting sequence/synthetic sequence
WPDTAVAPGPPPGPPRVSPD

SEQ ID NO: 8281 - protein, 20 aa, Artificial Sequence
  Description of Artificial Sequence: targeting sequence/synthetic sequence
VECQPGPPGDQGPPGIPGQP

SEQ ID NO: 8282 - protein, 20 aa, Artificial Sequence
  Description of Artificial Sequence: targeting sequence/synthetic sequence
PLFDETFEFLVPAEPCRKAG

SEQ ID NO: 8283 - protein, 20 aa, Artificial Sequence
  Description of Artificial Sequence: targeting sequence/synthetic sequence
PPKPLKKLRFDIEGSDEADG

SEQ ID NO: 8284 - protein, 20 aa, Artificial Sequence
  Description of Artificial Sequence: targeting sequence/synthetic sequence
TPGADGGPSGFPERGGNGSL

SEQ ID NO: 8285 - protein, 20 aa, Artificial Sequence
  Description of Artificial Sequence: targeting sequence/synthetic sequence
EKEEQEERETKTPECPSHTQ

SEQ ID NO: 8286 - protein, 20 aa, Artificial Sequence
  Description of Artificial Sequence: targeting sequence/synthetic sequence
GEKGSPGFPGEPGYPGLIGR

SEQ ID NO: 8287 - protein, 20 aa, Artificial Sequence
  Description of Artificial Sequence: targeting sequence/synthetic sequence
MKGDPGEILGHVPGMLLKGE

SEQ ID NO: 8288 - protein, 20 aa, Artificial Sequence
  Description of Artificial Sequence: targeting sequence/synthetic sequence
LKTDDTAVYYCVRDLEGAGK

SEQ ID NO: 8289 - protein, 20 aa, Artificial Sequence
  Description of Artificial Sequence: targeting sequence/synthetic sequence
FFEGRCERMGEADETMWGTK

SEQ ID NO: 8290 - protein, 20 aa, Artificial Sequence
  Description of Artificial Sequence: targeting sequence/synthetic sequence
LSLSPELQLEESCAEAQDGE

SEQ ID NO: 8291 - protein, 20 aa, Artificial Sequence
  Description of Artificial Sequence: targeting sequence/synthetic sequence
EPGEVPQTRLPLTYPAPNGD

SEQ ID NO: 8292 - protein, 20 aa, Artificial Sequence
  Description of Artificial Sequence: targeting sequence/synthetic sequence
ALVRDPRVLILDEATSALDV

SEQ ID NO: 8293 - protein, 20 aa, Artificial Sequence
  Description of Artificial Sequence: targeting sequence/synthetic sequence
PSILDPPDQVQFEKCGKRVD

SEQ ID NO: 8294 - protein, 20 aa, Artificial Sequence
  Description of Artificial Sequence: targeting sequence/synthetic sequence
QTTQPAATEAQTTPLAATEA

SEQ ID NO: 8295 - protein, 20 aa, Artificial Sequence
  Description of Artificial Sequence: targeting sequence/synthetic sequence
EAEKQYEDSCRVYQASSPDE

SEQ ID NO: 8296 - protein, 20 aa, Artificial Sequence
  Description of Artificial Sequence: targeting sequence/synthetic sequence
TIQPTQPTTQLPTDSPTQPT

SEQ ID NO: 8297 - protein, 20 aa, Artificial Sequence
  Description of Artificial Sequence: targeting sequence/synthetic sequence
QILSKLRLTSPPEPTVMTHV

SEQ ID NO: 8298 - protein, 20 aa, Artificial Sequence
  Description of Artificial Sequence: targeting sequence/synthetic sequence
LGRAAFGQGSGPIMLDEVQC

SEQ ID NO: 8299 - protein, 20 aa, Artificial Sequence
  Description of Artificial Sequence: targeting sequence/synthetic sequence
KGDAGPPGPAGPAGPPGPIG

SEQ ID NO: 8300 - protein, 20 aa, Artificial Sequence
  Description of Artificial Sequence: targeting sequence/synthetic sequence
TERCSDGWSFDATTLDDNGT

SEQ ID NO: 8301 - protein, 20 aa, Artificial Sequence
  Description of Artificial Sequence: targeting sequence/synthetic sequence
EIVCGEDDPCGTQICECDKA

SEQ ID NO: 8302 - protein, 20 aa, Artificial Sequence
  Description of Artificial Sequence: targeting sequence/synthetic sequence
EMLGSGQSRSPWADLTNEVD

SEQ ID NO: 8303 - protein, 20 aa, Artificial Sequence
  Description of Artificial Sequence: targeting sequence/synthetic sequence
NFSWYLEDNIKTYCSEPEKV

SEQ ID NO: 8304 - protein, 20 aa, Artificial Sequence
  Description of Artificial Sequence: targeting sequence/synthetic sequence
VDFGSATYDDEHHSTLVSTR

SEQ ID NO: 8305 - protein, 20 aa, Artificial Sequence
  Description of Artificial Sequence: targeting sequence/synthetic sequence
KLGSEIIDSSTRRMESERSP

SEQ ID NO: 8306 - protein, 20 aa, Artificial Sequence
  Description of Artificial Sequence: targeting sequence/synthetic sequence
DMGFVPSADGKACEDIDECS

SEQ ID NO: 8307 - protein, 20 aa, Artificial Sequence
  Description of Artificial Sequence: targeting sequence/synthetic sequence
AEDDTWEPEQKLCKLRKGNC

SEQ ID NO: 8308 - protein, 20 aa, Artificial Sequence
  Description of Artificial Sequence: targeting sequence/synthetic sequence
TAPEATEAQTTQPTATEAQT

SEQ ID NO: 8309 - protein, 20 aa, Artificial Sequence
  Description of Artificial Sequence: targeting sequence/synthetic sequence
SGYPGNPGLPGIPGQDGPPG

SEQ ID NO: 8310 - protein, 20 aa, Artificial Sequence
  Description of Artificial Sequence: targeting sequence/synthetic sequence
TLAARPAPSPGLGPGPECFT

SEQ ID NO: 8311 - protein, 20 aa, Artificial Sequence
  Description of Artificial Sequence: targeting sequence/synthetic sequence
ECALDPDICPNGICENLRGT

SEQ ID NO: 8312 - protein, 20 aa, Artificial Sequence
  Description of Artificial Sequence: targeting sequence/synthetic sequence
TSWSTSTETGVKMSSEFEVE

SEQ ID NO: 8313 - protein, 20 aa, Artificial Sequence
  Description of Artificial Sequence: targeting sequence/synthetic sequence
CCKQSSVLNWQDCEVPSPQS

SEQ ID NO: 8314 - protein, 20 aa, Artificial Sequence
  Description of Artificial Sequence: targeting sequence/synthetic sequence
GLPGLKGLPGLPGIPGTPGE

SEQ ID NO: 8315 - protein, 20 aa, Artificial Sequence
  Description of Artificial Sequence: targeting sequence/synthetic sequence
APGPITMDLTGDLEALKKET

SEQ ID NO: 8316 - protein, 20 aa, Artificial Sequence
  Description of Artificial Sequence: targeting sequence/synthetic sequence
GFDSTKDLPDDVITFARSHP

SEQ ID NO: 8317 - protein, 20 aa, Artificial Sequence
  Description of Artificial Sequence: targeting sequence/synthetic sequence
KAGVLSQADYLNLVQCETLE

SEQ ID NO: 8318 - protein, 20 aa, Artificial Sequence
  Description of Artificial Sequence: targeting sequence/synthetic sequence
PPGPMVSEPAGAAAEGTLRP

SEQ ID NO: 8319 - protein, 20 aa, Artificial Sequence
  Description of Artificial Sequence: targeting sequence/synthetic sequence
GCRQILGQLQPSLKTGSEEL

SEQ ID NO: 8320 - protein, 20 aa, Artificial Sequence
  Description of Artificial Sequence: targeting sequence/synthetic sequence
RRNVPHEDICEDSDIDGDYR

SEQ ID NO: 8321 - protein, 20 aa, Artificial Sequence
  Description of Artificial Sequence: targeting sequence/synthetic sequence
DYGHPVYIVQEMPPQSPANI

SEQ ID NO: 8322 - protein, 20 aa, Artificial Sequence
  Description of Artificial Sequence: targeting sequence/synthetic sequence
EMETLGKDITPINEDIEETN

SEQ ID NO: 8323 - protein, 20 aa, Artificial Sequence
  Description of Artificial Sequence: targeting sequence/synthetic sequence
SRTPEVTCVVVDVSHEDPEV

SEQ ID NO: 8324 - protein, 20 aa, Artificial Sequence
  Description of Artificial Sequence: targeting sequence/synthetic sequence
AFGQGSGPIMLDEVQCTGTE

SEQ ID NO: 8325 - protein, 20 aa, Artificial Sequence
  Description of Artificial Sequence: targeting sequence/synthetic sequence
SDEEEDPPAKRKCIFMSETQ

SEQ ID NO: 8326 - protein, 20 aa, Artificial Sequence
  Description of Artificial Sequence: targeting sequence/synthetic sequence
VLKVLSVCSSNKPAIVEAGG

SEQ ID NO: 8327 - protein, 20 aa, Artificial Sequence
  Description of Artificial Sequence: targeting sequence/synthetic sequence
TPVDELDRCCKIHDDCYDEA

SEQ ID NO: 8328 - protein, 20 aa, Artificial Sequence
  Description of Artificial Sequence: targeting sequence/synthetic sequence
CNRKRKGSSTDYQESMDTDK

SEQ ID NO: 8329 - protein, 20 aa, Artificial Sequence
  Description of Artificial Sequence: targeting sequence/synthetic sequence
QFTNERVQLTPDDDDIVRKI

SEQ ID NO: 8330 - protein, 20 aa, Artificial Sequence
  Description of Artificial Sequence: targeting sequence/synthetic sequence
PPGGDFSDPVTSATLGIVQV

SEQ ID NO: 8331 - protein, 20 aa, Artificial Sequence
  Description of Artificial Sequence: targeting sequence/synthetic sequence
LMAVLAAGALTQPVPPADPA

SEQ ID NO: 8332 - protein, 20 aa, Artificial Sequence
  Description of Artificial Sequence: targeting sequence/synthetic sequence
DVWGQGTTVTVSSAPTKAPD

SEQ ID NO: 8333 - protein, 20 aa, Artificial Sequence
  Description of Artificial Sequence: targeting sequence/synthetic sequence
RLSGELVYFEKSPDFCERDP

SEQ ID NO: 8334 - protein, 20 aa, Artificial Sequence
  Description of Artificial Sequence: targeting sequence/synthetic sequence
PVDDLDRCCQVHDECYGEAV

SEQ ID NO: 8335 - protein, 20 aa, Artificial Sequence
  Description of Artificial Sequence: targeting sequence/synthetic sequence
SNPPKPLKKLRFDIEGSDEA

SEQ ID NO: 8336 - protein, 20 aa, Artificial Sequence
  Description of Artificial Sequence: targeting sequence/synthetic sequence
PQPPRKKRARVDPTVENEET

SEQ ID NO: 8337 - protein, 20 aa, Artificial Sequence
  Description of Artificial Sequence: targeting sequence/synthetic sequence
EAGIPGVPGAKGEDGKDGSP

SEQ ID NO: 8338 - protein, 20 aa, Artificial Sequence
  Description of Artificial Sequence: targeting sequence/synthetic sequence
LKKCKEFHPDKGGDEEKMKK

SEQ ID NO: 8339 - protein, 20 aa, Artificial Sequence
  Description of Artificial Sequence: targeting sequence/synthetic sequence
TFPGPGEDGLNPFLEVKVTD

SEQ ID NO: 8340 - protein, 20 aa, Artificial Sequence
  Description of Artificial Sequence: targeting sequence/synthetic sequence
GGELFDKVVGNKRLKEATCK

SEQ ID NO: 8341 - protein, 20 aa, Artificial Sequence
  Description of Artificial Sequence: targeting sequence/synthetic sequence
VDENFSWYLEDNIKTYCSEP

SEQ ID NO: 8342 - protein, 20 aa, Artificial Sequence
  Description of Artificial Sequence: targeting sequence/synthetic sequence
IPGTTVMGPPGPPGPPGPQG

SEQ ID NO: 8343 - protein, 20 aa, Artificial Sequence
  Description of Artificial Sequence: targeting sequence/synthetic sequence
AMTPPNATEASKPQGTTVCP

SEQ ID NO: 8344 - protein, 20 aa, Artificial Sequence
  Description of Artificial Sequence: targeting sequence/synthetic sequence
TGPQGPPGPTGPGGDKGDTG

SEQ ID NO: 8345 - protein, 20 aa, Artificial Sequence
  Description of Artificial Sequence: targeting sequence/synthetic sequence
EKGEGGPPGVAGPPGKDGTS

SEQ ID NO: 8346 - protein, 20 aa, Artificial Sequence
  Description of Artificial Sequence: targeting sequence/synthetic sequence
EGFLESKVFISNSTNSSNPC

SEQ ID NO: 8347 - protein, 20 aa, Artificial Sequence
  Description of Artificial Sequence: targeting sequence/synthetic sequence
ETSQLSQGLVCPMSVDQKDT

SEQ ID NO: 8348 - protein, 20 aa, Artificial Sequence
  Description of Artificial Sequence: targeting sequence/synthetic sequence
HMMSAVDRSFTDQSTLQEDE

SEQ ID NO: 8349 - protein, 20 aa, Artificial Sequence
  Description of Artificial Sequence: targeting sequence/synthetic sequence
GVLSQADYLNLVQCETLEDL

SEQ ID NO: 8350 - protein, 20 aa, Artificial Sequence
  Description of Artificial Sequence: targeting sequence/synthetic sequence
TDEPTTQPTTEPTTQPTIQP

SEQ ID NO: 8351 - protein, 20 aa, Artificial Sequence
  Description of Artificial Sequence: targeting sequence/synthetic sequence
SPVLTFAGGLPDVPVTSAPV

SEQ ID NO: 8352 - protein, 20 aa, Artificial Sequence
  Description of Artificial Sequence: targeting sequence/synthetic sequence
GAVGQPGIGFPGPPGPKGVD

SEQ ID NO: 8353 - protein, 20 aa, Artificial Sequence
  Description of Artificial Sequence: targeting sequence/synthetic sequence
SASVSSGEPTVPWDPSSTLL

SEQ ID NO: 8354 - protein, 20 aa, Artificial Sequence
  Description of Artificial Sequence: targeting sequence/synthetic sequence
AKADQCYEDVRVSQTTWDSG

SEQ ID NO: 8355 - protein, 20 aa, Artificial Sequence
  Description of Artificial Sequence: targeting sequence/synthetic sequence
EKGERGYPGTPGPRGEPGPK

SEQ ID NO: 8356 - protein, 20 aa, Artificial Sequence
  Description of Artificial Sequence: targeting sequence/synthetic sequence
KGKKAGPPGPNGPPGPPGPP

SEQ ID NO: 8357 - protein, 20 aa, Artificial Sequence
  Description of Artificial Sequence: targeting sequence/synthetic sequence
SMFLPRDDLSPARDLLDVPS

SEQ ID NO: 8358 - protein, 20 aa, Artificial Sequence
  Description of Artificial Sequence: targeting sequence/synthetic sequence
AAMEIQTTQPAATEAQTTPL

SEQ ID NO: 8359 - protein, 20 aa, Artificial Sequence
  Description of Artificial Sequence: targeting sequence/synthetic sequence
AKAARKKAAKAARKKAAKAA

SEQ ID NO: 8360 - protein, 20 aa, Artificial Sequence
  Description of Artificial Sequence: targeting sequence/synthetic sequence
LTFAGGLPDVPVTSAPVTAF

SEQ ID NO: 8361 - protein, 20 aa, Artificial Sequence
  Description of Artificial Sequence: targeting sequence/synthetic sequence
NCHLARAPNHAVVTRKDKEA

SEQ ID NO: 8362 - protein, 20 aa, Artificial Sequence
  Description of Artificial Sequence: targeting sequence/synthetic sequence
NFRPGVLSSGCELPESLQAP

SEQ ID NO: 8363 - protein, 20 aa, Artificial Sequence
  Description of Artificial Sequence: targeting sequence/synthetic sequence
LRKCLESGMKKEMIMSDEAV

SEQ ID NO: 8364 - protein, 20 aa, Artificial Sequence
  Description of Artificial Sequence: targeting sequence/synthetic sequence
LHRLQEAPKKESPGCLEASV

SEQ ID NO: 8365 - protein, 20 aa, Artificial Sequence
  Description of Artificial Sequence: targeting sequence/synthetic sequence
LGCCSDGKTPSLDAEGSNCP

SEQ ID NO: 8366 - protein, 20 aa, Artificial Sequence
  Description of Artificial Sequence: targeting sequence/synthetic sequence
ALGAQKEAISPPDAASAAPL

SEQ ID NO: 8367 - protein, 20 aa, Artificial Sequence
  Description of Artificial Sequence: targeting sequence/synthetic sequence
ASETNWESVTSSISGVSYNS

SEQ ID NO: 8368 - protein, 20 aa, Artificial Sequence
  Description of Artificial Sequence: targeting sequence/synthetic sequence
APFRSALESSPDPATLSKED

SEQ ID NO: 8369 - protein, 20 aa, Artificial Sequence
  Description of Artificial Sequence: targeting sequence/synthetic sequence
VGPDDSAVDMDECKEPDVCK

SEQ ID NO: 8370 - protein, 20 aa, Artificial Sequence
  Description of Artificial Sequence: targeting sequence/synthetic sequence
FCFSDSIPTPSNMEETQQKS

SEQ ID NO: 8371 - protein, 20 aa, Artificial Sequence
  Description of Artificial Sequence: targeting sequence/synthetic sequence
PAHTDAFQDWGPGSMAHVSV

SEQ ID NO: 8372 - protein, 20 aa, Artificial Sequence
  Description of Artificial Sequence: targeting sequence/synthetic sequence
TPGPPGLPGLQGPVGPPGFT

SEQ ID NO: 8373 - protein, 20 aa, Artificial Sequence
  Description of Artificial Sequence: targeting sequence/synthetic sequence
LVYTQVAEQLINPFGEDDDD

SEQ ID NO: 8374 - protein, 20 aa, Artificial Sequence
  Description of Artificial Sequence: targeting sequence/synthetic sequence
STLPPPWSPRPLEATAPTAP

SEQ ID NO: 8375 - protein, 20 aa, Artificial Sequence
  Description of Artificial Sequence: targeting sequence/synthetic sequence
KFIEWLKARILPEVKEKHEF

SEQ ID NO: 8376 - protein, 20 aa, Artificial Sequence
  Description of Artificial Sequence: targeting sequence/synthetic sequence
CCVECPPCPAPPVAGPSVFL

SEQ ID NO: 8377 - protein, 20 aa, Artificial Sequence
  Description of Artificial Sequence: targeting sequence/synthetic sequence
LDPDICPNGICENLRGTYKC

SEQ ID NO: 8378 - protein, 20 aa, Artificial Sequence
  Description of Artificial Sequence: targeting sequence/synthetic sequence
LHRLQEAPKKESAGCLEASV

SEQ ID NO: 8379 - protein, 20 aa, Artificial Sequence
  Description of Artificial Sequence: targeting sequence/synthetic sequence
GEPAEVTTTVLVRRDHHGAN

SEQ ID NO: 8380 - protein, 20 aa, Artificial Sequence
  Description of Artificial Sequence: targeting sequence/synthetic sequence
TEMLGSGQSRSPWADLTNEV

SEQ ID NO: 8381 - protein, 20 aa, Artificial Sequence
  Description of Artificial Sequence: targeting sequence/synthetic sequence
NGKEYKCKVSNKALPAPIEK

SEQ ID NO: 8382 - protein, 20 aa, Artificial Sequence
  Description of Artificial Sequence: targeting sequence/synthetic sequence
QETAVTQTYGGNSNGEPCVL

SEQ ID NO: 8383 - protein, 20 aa, Artificial Sequence
  Description of Artificial Sequence: targeting sequence/synthetic sequence
DPWADSVGVRPRTTERHIAV

SEQ ID NO: 8384 - protein, 20 aa, Artificial Sequence
  Description of Artificial Sequence: targeting sequence/synthetic sequence
PPPDLATSPTKSPFKIPPVT

SEQ ID NO: 8385 - protein, 20 aa, Artificial Sequence
  Description of Artificial Sequence: targeting sequence/synthetic sequence
VLGRLVHCPIETQVLREAEE

SEQ ID NO: 8386 - protein, 20 aa, Artificial Sequence
  Description of Artificial Sequence: targeting sequence/synthetic sequence
TATCIAKSSHLVSRTQDIHI

SEQ ID NO: 8387 - protein, 20 aa, Artificial Sequence
  Description of Artificial Sequence: targeting sequence/synthetic sequence
GPVGPPGFTGPPGPPGPPGP

SEQ ID NO: 8388 - protein, 20 aa, Artificial Sequence
  Description of Artificial Sequence: targeting sequence/synthetic sequence
LHNNEAGRQAVAKLMSVDCR

SEQ ID NO: 8389 - protein, 20 aa, Artificial Sequence
  Description of Artificial Sequence: targeting sequence/synthetic sequence
PLPQPLPGTEPTWTPGPAHS

SEQ ID NO: 8390 - protein, 20 aa, Artificial Sequence
  Description of Artificial Sequence: targeting sequence/synthetic sequence
TSLPGPSGRDGLPGPPGSPG

SEQ ID NO: 8391 - protein, 20 aa, Artificial Sequence
  Description of Artificial Sequence: targeting sequence/synthetic sequence
AVEVSPGCWIIDNNICDQSC

SEQ ID NO: 8392 - protein, 20 aa, Artificial Sequence
  Description of Artificial Sequence: targeting sequence/synthetic sequence
AQGPPGPAGPAGERGEQGPA

SEQ ID NO: 8393 - protein, 20 aa, Artificial Sequence
  Description of Artificial Sequence: targeting sequence/synthetic sequence
NGPPGPPGPPGPQGPPGIPG

SEQ ID NO: 8394 - protein, 20 aa, Artificial Sequence
  Description of Artificial Sequence: targeting sequence/synthetic sequence
VDSNLCGAMDPSDGIGALIE

SEQ ID NO: 8395 - protein, 20 aa, Artificial Sequence
  Description of Artificial Sequence: targeting sequence/synthetic sequence
AQTTAPEATEAQTTQPTATE

SEQ ID NO: 8396 - protein, 20 aa, Artificial Sequence
  Description of Artificial Sequence: targeting sequence/synthetic sequence
AQGDVPVTVTVHDFPGKKLV

SEQ ID NO: 8397 - protein, 20 aa, Artificial Sequence
  Description of Artificial Sequence: targeting sequence/synthetic sequence
PSCCPSKGQDTSEELLRWST

SEQ ID NO: 8398 - protein, 20 aa, Artificial Sequence
  Description of Artificial Sequence: targeting sequence/synthetic sequence
SVANDTGFVDIPKQEKALMK

SEQ ID NO: 8399 - protein, 20 aa, Artificial Sequence
  Description of Artificial Sequence: targeting sequence/synthetic sequence
WTQLTYIHKESDSWLKKFTE

SEQ ID NO: 8400 - protein, 20 aa, Artificial Sequence
  Description of Artificial Sequence: targeting sequence/synthetic sequence
VDTQGTVVCSLDGLFPVSEA

SEQ ID NO: 8401 - protein, 20 aa, Artificial Sequence
  Description of Artificial Sequence: targeting sequence/synthetic sequence
QPLPGTEPTWTPGPAHSDFL

SEQ ID NO: 8402 - protein, 20 aa, Artificial Sequence
  Description of Artificial Sequence: targeting sequence/synthetic sequence
VLSCKSSCSLGCDLPETHSL

SEQ ID NO: 8403 - protein, 20 aa, Artificial Sequence
  Description of Artificial Sequence: targeting sequence/synthetic sequence
LVHCPIETQVLREAEEHQET

SEQ ID NO: 8404 - protein, 20 aa, Artificial Sequence
  Description of Artificial Sequence: targeting sequence/synthetic sequence
GSEPEEEEDVSQAILFPATD

SEQ ID NO: 8405 - protein, 20 aa, Artificial Sequence
  Description of Artificial Sequence: targeting sequence/synthetic sequence
ISPEAIVTADGADFPMDSSN

SEQ ID NO: 8406 - protein, 20 aa, Artificial Sequence
  Description of Artificial Sequence: targeting sequence/synthetic sequence
IDTKSYWKALGISPFHEHAE

SEQ ID NO: 8407 - protein, 20 aa, Artificial Sequence
  Description of Artificial Sequence: targeting sequence/synthetic sequence
HEKIKKKDPKCIFACEEMSG

SEQ ID NO: 8408 - protein, 20 aa, Artificial Sequence
  Description of Artificial Sequence: targeting sequence/synthetic sequence
LHNNEAGRRTVYNLADVACK

SEQ ID NO: 8409 - protein, 20 aa, Artificial Sequence
  Description of Artificial Sequence: targeting sequence/synthetic sequence
SRGSESGIFTNTKESSSHHP

SEQ ID NO: 8410 - protein, 20 aa, Artificial Sequence
  Description of Artificial Sequence: targeting sequence/synthetic sequence
PGTVALREIRRYQKSTELLI

SEQ ID NO: 8411 - protein, 20 aa, Artificial Sequence
  Description of Artificial Sequence: targeting sequence/synthetic sequence
QTTPPAATEAQTTQPTGLEA

SEQ ID NO: 8412 - protein, 20 aa, Artificial Sequence
  Description of Artificial Sequence: targeting sequence/synthetic sequence
KCLESGMKKEMIMSDEAVEE

SEQ ID NO: 8413 - protein, 20 aa, Artificial Sequence
  Description of Artificial Sequence: targeting sequence/synthetic sequence
TGVKMSSEFEVEGAFKMGGE

SEQ ID NO: 8414 - protein, 20 aa, Artificial Sequence
  Description of Artificial Sequence: targeting sequence/synthetic sequence
VLEVSGSKAVVQVFEGTSGI

SEQ ID NO: 8415 - protein, 20 aa, Artificial Sequence
  Description of Artificial Sequence: targeting sequence/synthetic sequence
PDSSTLPPPWSPRPLEATAP

SEQ ID NO: 8416 - protein, 20 aa, Artificial Sequence
  Description of Artificial Sequence: targeting sequence/synthetic sequence
PQPLPGTEPTWTPGPAHSDF

SEQ ID NO: 8417 - protein, 20 aa, Artificial Sequence
  Description of Artificial Sequence: targeting sequence/synthetic sequence
LEFNSKDFIAEDINVFMKDD

SEQ ID NO: 8418 - protein, 20 aa, Artificial Sequence
  Description of Artificial Sequence: targeting sequence/synthetic sequence
IRKSPQGGMEWIGYIFHSGT

SEQ ID NO: 8419 - protein, 20 aa, Artificial Sequence
  Description of Artificial Sequence: targeting sequence/synthetic sequence
AQKEAISPPDAASAAPLRTI

SEQ ID NO: 8420 - protein, 20 aa, Artificial Sequence
  Description of Artificial Sequence: targeting sequence/synthetic sequence
DSSMFLPRDDLSPARDLLDV

SEQ ID NO: 8421 - protein, 20 aa, Artificial Sequence
  Description of Artificial Sequence: targeting sequence/synthetic sequence
RACEAAKKTKADDRGTDEKT

SEQ ID NO: 8422 - protein, 20 aa, Artificial Sequence
  Description of Artificial Sequence: targeting sequence/synthetic sequence
PPDTTSPEPPNTTSPESPDT

SEQ ID NO: 8423 - protein, 20 aa, Artificial Sequence
  Description of Artificial Sequence: targeting sequence/synthetic sequence
EEMEFFEGRCERMGEADETM

SEQ ID NO: 8424 - protein, 20 aa, Artificial Sequence
  Description of Artificial Sequence: targeting sequence/synthetic sequence
SKMEQVSGVLGIEDYSVSQT

SEQ ID NO: 8425 - protein, 20 aa, Artificial Sequence
  Description of Artificial Sequence: targeting sequence/synthetic sequence
EKWQEQYDGREGRTVVHCLN

SEQ ID NO: 8426 - protein, 20 aa, Artificial Sequence
  Description of Artificial Sequence: targeting sequence/synthetic sequence
KEGKEVTFQTDEDVPSGIAA

SEQ ID NO: 8427 - protein, 20 aa, Artificial Sequence
  Description of Artificial Sequence: targeting sequence/synthetic sequence
VWVSSEAYTSPVSRAQSESE

SEQ ID NO: 8428 - protein, 20 aa, Artificial Sequence
  Description of Artificial Sequence: targeting sequence/synthetic sequence
PEAPEGVRDFPRCRYVHKVS

SEQ ID NO: 8429 - protein, 20 aa, Artificial Sequence
  Description of Artificial Sequence: targeting sequence/synthetic sequence
IDECQNGPVCQRNAECINTA

SEQ ID NO: 8430 - protein, 20 aa, Artificial Sequence
  Description of Artificial Sequence: targeting sequence/synthetic sequence
DNEAYVHDAPVRSLNCTLRD

SEQ ID NO: 8431 - protein, 20 aa, Artificial Sequence
  Description of Artificial Sequence: targeting sequence/synthetic sequence
PKFGRCPLAAKEESIPKIPD

SEQ ID NO: 8432 - protein, 20 aa, Artificial Sequence
  Description of Artificial Sequence: targeting sequence/synthetic sequence
QGDVPVTVTVHDFPGKKLVL

SEQ ID NO: 8433 - protein, 20 aa, Artificial Sequence
  Description of Artificial Sequence: targeting sequence/synthetic sequence
TTQPTGLEAQTTAPAAMEAQ

SEQ ID NO: 8434 - protein, 20 aa, Artificial Sequence
  Description of Artificial Sequence: targeting sequence/synthetic sequence
AHMSEEGNEEWECKRSYSDR

SEQ ID NO: 8435 - protein, 20 aa, Artificial Sequence
  Description of Artificial Sequence: targeting sequence/synthetic sequence
SFCFSDSIPTPSNMEETQQK

SEQ ID NO: 8436 - protein, 20 aa, Artificial Sequence
  Description of Artificial Sequence: targeting sequence/synthetic sequence
NSQKASKACCVPTKLEPISI

SEQ ID NO: 8437 - protein, 20 aa, Artificial Sequence
  Description of Artificial Sequence: targeting sequence/synthetic sequence
EDDAALRAGSRGLSDPWADS

SEQ ID NO: 8438 - protein, 20 aa, Artificial Sequence
  Description of Artificial Sequence: targeting sequence/synthetic sequence
KEVTFQTDEDVPSGIAAESL

SEQ ID NO: 8439 - protein, 20 aa, Artificial Sequence
  Description of Artificial Sequence: targeting sequence/synthetic sequence
GCCSDGKTPSLDAEGSNCPA

SEQ ID NO: 8440 - protein, 20 aa, Artificial Sequence
  Description of Artificial Sequence: targeting sequence/synthetic sequence
LEDECEAPLVCRAGCSPEHG

SEQ ID NO: 8441 - protein, 20 aa, Artificial Sequence
  Description of Artificial Sequence: targeting sequence/synthetic sequence
GVRLSPLAERQLQVQWEPPG

SEQ ID NO: 8442 - protein, 20 aa, Artificial Sequence
  Description of Artificial Sequence: targeting sequence/synthetic sequence
AGATPKKAKKAAGAKKAVKK

SEQ ID NO: 8443 - protein, 20 aa, Artificial Sequence
  Description of Artificial Sequence: targeting sequence/synthetic sequence
PGPPGPQGPPGLQGPSGAAD

SEQ ID NO: 8444 - protein, 20 aa, Artificial Sequence
  Description of Artificial Sequence: targeting sequence/synthetic sequence
EEYANCHLARAPNHAVVTRK

SEQ ID NO: 8445 - protein, 20 aa, Artificial Sequence
  Description of Artificial Sequence: targeting sequence/synthetic sequence
LLDSEGHIKLTDYGMCKEGL

SEQ ID NO: 8446 - protein, 20 aa, Artificial Sequence
  Description of Artificial Sequence: targeting sequence/synthetic sequence
SAEGEPSAAPTDVKATSVSV

SEQ ID NO: 8447 - protein, 20 aa, Artificial Sequence
  Description of Artificial Sequence: targeting sequence/synthetic sequence
FYGSGGTYALSLSQYNMGIN

SEQ ID NO: 8448 - protein, 20 aa, Artificial Sequence
  Description of Artificial Sequence: targeting sequence/synthetic sequence
LPGPSGRDGLPGPPGSPGPP

SEQ ID NO: 8449 - protein, 20 aa, Artificial Sequence
  Description of Artificial Sequence: targeting sequence/synthetic sequence
VSDEAELLVRGPPGPPGIVI

SEQ ID NO: 8450 - protein, 20 aa, Artificial Sequence
  Description of Artificial Sequence: targeting sequence/synthetic sequence
PDDSAVDMDECKEPDVCKHG

SEQ ID NO: 8451 - protein, 20 aa, Artificial Sequence
  Description of Artificial Sequence: targeting sequence/synthetic sequence
FKNFRPGVLSSGCELPESLQ

SEQ ID NO: 8452 - protein, 20 aa, Artificial Sequence
  Description of Artificial Sequence: targeting sequence/synthetic sequence
ERVQLTPDDDDIVRKIDQSE

SEQ ID NO: 8453 - protein, 20 aa, Artificial Sequence
  Description of Artificial Sequence: targeting sequence/synthetic sequence
GTPVDDLDRCCQVHDECYGE

SEQ ID NO: 8454 - protein, 20 aa, Artificial Sequence
  Description of Artificial Sequence: targeting sequence/synthetic sequence
SKEFDQSKFVETDFSEKACF

SEQ ID NO: 8455 - protein, 20 aa, Artificial Sequence
  Description of Artificial Sequence: targeting sequence/synthetic sequence
VGESASVSSGEPTVPWDPSS

SEQ ID NO: 8456 - protein, 20 aa, Artificial Sequence
  Description of Artificial Sequence: targeting sequence/synthetic sequence
EKNSTKQEILAALEKGCSFL

SEQ ID NO: 8457 - protein, 20 aa, Artificial Sequence
  Description of Artificial Sequence: targeting sequence/synthetic sequence
PKILILDEATSALDSESKSA

SEQ ID NO: 8458 - protein, 20 aa, Artificial Sequence
  Description of Artificial Sequence: targeting sequence/synthetic sequence
DESLIKYKKTLLGDGPVVTD

SEQ ID NO: 8459 - protein, 20 aa, Artificial Sequence
  Description of Artificial Sequence: targeting sequence/synthetic sequence
GLPGEKGDHGFPGSSGPRGD

SEQ ID NO: 8460 - protein, 20 aa, Artificial Sequence
  Description of Artificial Sequence: targeting sequence/synthetic sequence
VTEMLGSGQSRSPWADLTNE

SEQ ID NO: 8461 - protein, 20 aa, Artificial Sequence
  Description of Artificial Sequence: targeting sequence/synthetic sequence
RKGPCDRCGQCRFGALCEAE

SEQ ID NO: 8462 - protein, 20 aa, Artificial Sequence
  Description of Artificial Sequence: targeting sequence/synthetic sequence
KTDDTAVYYCVRDLEGAGKY

SEQ ID NO: 8463 - protein, 20 aa, Artificial Sequence
  Description of Artificial Sequence: targeting sequence/synthetic sequence
AMGIMNSFVNDIFERIAGEA

SEQ ID NO: 8464 - protein, 20 aa, Artificial Sequence
  Description of Artificial Sequence: targeting sequence/synthetic sequence
STEATLSFGYLDPFPPEERP

SEQ ID NO: 8465 - protein, 20 aa, Artificial Sequence
  Description of Artificial Sequence: targeting sequence/synthetic sequence
LVCESAPGPITMDLTGDLEA

SEQ ID NO: 8466 - protein, 20 aa, Artificial Sequence
  Description of Artificial Sequence: targeting sequence/synthetic sequence
MAVTEMLGSGQSRSPWADLT

SEQ ID NO: 8467 - protein, 20 aa, Artificial Sequence
  Description of Artificial Sequence: targeting sequence/synthetic sequence
DLKKSFKSPEPRLFTPEEFF

SEQ ID NO: 8468 - protein, 20 aa, Artificial Sequence
  Description of Artificial Sequence: targeting sequence/synthetic sequence
APILPVSPIWEPPPATTSTT

SEQ ID NO: 8469 - protein, 20 aa, Artificial Sequence
  Description of Artificial Sequence: targeting sequence/synthetic sequence
LDIDECQLGVHSCGENASCT

SEQ ID NO: 8470 - protein, 20 aa, Artificial Sequence
  Description of Artificial Sequence: targeting sequence/synthetic sequence
EQGVEDSANEDSVDAKPDRS

SEQ ID NO: 8471 - protein, 20 aa, Artificial Sequence
  Description of Artificial Sequence: targeting sequence/synthetic sequence
EDEEHTIITDTELPPLKLMH

SEQ ID NO: 8472 - protein, 20 aa, Artificial Sequence
  Description of Artificial Sequence: targeting sequence/synthetic sequence
VNPVALPRAQEGLRPGTLCT

SEQ ID NO: 8473 - protein, 20 aa, Artificial Sequence
  Description of Artificial Sequence: targeting sequence/synthetic sequence
EIIASLSVKEPTRIELTPKR

SEQ ID NO: 8474 - protein, 20 aa, Artificial Sequence
  Description of Artificial Sequence: targeting sequence/synthetic sequence
KRRVVQREKRAVGIGALFLG

SEQ ID NO: 8475 - protein, 20 aa, Artificial Sequence
  Description of Artificial Sequence: targeting sequence/synthetic sequence
LDNVLLDSEGHIKLTDYGMC

SEQ ID NO: 8476 - protein, 20 aa, Artificial Sequence
  Description of Artificial Sequence: targeting sequence/synthetic sequence
SHPRLDPEEIQMADYISKNV

SEQ ID NO: 8477 - protein, 20 aa, Artificial Sequence
  Description of Artificial Sequence: targeting sequence/synthetic sequence
PDCPSCALAALPKDVPNSQP

SEQ ID NO: 8478 - protein, 20 aa, Artificial Sequence
  Description of Artificial Sequence: targeting sequence/synthetic sequence
SLERLRRGLAAGTSNPDPPT

SEQ ID NO: 8479 - protein, 20 aa, Artificial Sequence
  Description of Artificial Sequence: targeting sequence/synthetic sequence
SKKVTELLRTFCESKRLTTD

SEQ ID NO: 8480 - protein, 20 aa, Artificial Sequence
  Description of Artificial Sequence: targeting sequence/synthetic sequence
SHWPSCCPSKGQDTSEELLR

SEQ ID NO: 8481 - protein, 20 aa, Artificial Sequence
  Description of Artificial Sequence: targeting sequence/synthetic sequence
DEKAVRPGYPKLIRDVWGIE

SEQ ID NO: 8482 - protein, 20 aa, Artificial Sequence
  Description of Artificial Sequence: targeting sequence/synthetic sequence
PTKARRRVVQREKRAVGMLG

SEQ ID NO: 8483 - protein, 20 aa, Artificial Sequence
  Description of Artificial Sequence: targeting sequence/synthetic sequence
MSPGASVRVSCKTSGYAFHT

SEQ ID NO: 8484 - protein, 20 aa, Artificial Sequence
  Description of Artificial Sequence: targeting sequence/synthetic sequence
SKNQKTICQQAVDTVLAKKR

SEQ ID NO: 8485 - protein, 20 aa, Artificial Sequence
  Description of Artificial Sequence: targeting sequence/synthetic sequence
GVKKPHRYRPGTVALREIRR

SEQ ID NO: 8486 - protein, 20 aa, Artificial Sequence
  Description of Artificial Sequence: targeting sequence/synthetic sequence
RGSEPEEEEDVSQAILFPAT

SEQ ID NO: 8487 - protein, 20 aa, Artificial Sequence
  Description of Artificial Sequence: targeting sequence/synthetic sequence
EDKWNKPQKTRGRRGNHTMN

SEQ ID NO: 8488 - protein, 20 aa, Artificial Sequence
  Description of Artificial Sequence: targeting sequence/synthetic sequence
WASQRWVFKNDGSIYSLYDD

SEQ ID NO: 8489 - protein, 20 aa, Artificial Sequence
  Description of Artificial Sequence: targeting sequence/synthetic sequence
ISSKAMSIMNSFVTDIFERI

SEQ ID NO: 8490 - protein, 20 aa, Artificial Sequence
  Description of Artificial Sequence: targeting sequence/synthetic sequence
TAVYYCVRDLEGAGKYDWYF

SEQ ID NO: 8491 - protein, 20 aa, Artificial Sequence
  Description of Artificial Sequence: targeting sequence/synthetic sequence
SDVRCLTGSEELYTIHPTPP

SEQ ID NO: 8492 - protein, 20 aa, Artificial Sequence
  Description of Artificial Sequence: targeting sequence/synthetic sequence
EHSVRYQCKNYYKLRTEGDG

SEQ ID NO: 8493 - protein, 20 aa, Artificial Sequence
  Description of Artificial Sequence: targeting sequence/synthetic sequence
VRSTEATLSFGYLDPFPPEE

SEQ ID NO: 8494 - protein, 20 aa, Artificial Sequence
  Description of Artificial Sequence: targeting sequence/synthetic sequence
GPQGPPGIPGIPGIPGTTVM

SEQ ID NO: 8495 - protein, 20 aa, Artificial Sequence
  Description of Artificial Sequence: targeting sequence/synthetic sequence
EEHTIITDTELPPLKLMHSF

SEQ ID NO: 8496 - protein, 20 aa, Artificial Sequence
  Description of Artificial Sequence: targeting sequence/synthetic sequence
GGTAEVAPDAVPRSGRSCWR

SEQ ID NO: 8497 - protein, 20 aa, Artificial Sequence
  Description of Artificial Sequence: targeting sequence/synthetic sequence
QRWLFRNDGSIYNLHDDMVM

SEQ ID NO: 8498 - protein, 20 aa, Artificial Sequence
  Description of Artificial Sequence: targeting sequence/synthetic sequence
VEDSANEDSVDAKPDRSSFV

SEQ ID NO: 8499 - protein, 20 aa, Artificial Sequence
  Description of Artificial Sequence: targeting sequence/synthetic sequence
ASPPSQGEVPPGPLPEAVLA

SEQ ID NO: 8500 - protein, 20 aa, Artificial Sequence
  Description of Artificial Sequence: targeting sequence/synthetic sequence
LIRKLPFQRLVREIAQDFNT

SEQ ID NO: 8501 - protein, 20 aa, Artificial Sequence
  Description of Artificial Sequence: targeting sequence/synthetic sequence
PGASGYPGNPGLPGIPGQDG

SEQ ID NO: 8502 - protein, 20 aa, Artificial Sequence
  Description of Artificial Sequence: targeting sequence/synthetic sequence
DLQPVGSGAYGAVCSAVDGR

SEQ ID NO: 8503 - protein, 20 aa, Artificial Sequence
  Description of Artificial Sequence: targeting sequence/synthetic sequence
TAALGCLVKDYFPEPVTVSW

SEQ ID NO: 8504 - protein, 20 aa, Artificial Sequence
  Description of Artificial Sequence: targeting sequence/synthetic sequence
NLCGAMDPSDGIGALIEEER

SEQ ID NO: 8505 - protein, 20 aa, Artificial Sequence
  Description of Artificial Sequence: targeting sequence/synthetic sequence
SVRYQCKNYYKLRTEGDGVY

SEQ ID NO: 8506 - protein, 20 aa, Artificial Sequence
  Description of Artificial Sequence: targeting sequence/synthetic sequence
SLQTGSEELRSLYNTIAVLY

SEQ ID NO: 8507 - protein, 20 aa, Artificial Sequence
  Description of Artificial Sequence: targeting sequence/synthetic sequence
KTTLQQEKPDFCFLEEDPGI

SEQ ID NO: 8508 - protein, 20 aa, Artificial Sequence
  Description of Artificial Sequence: targeting sequence/synthetic sequence
EEPLQFRVPGTSTSATLTGL

SEQ ID NO: 8509 - protein, 20 aa, Artificial Sequence
  Description of Artificial Sequence: targeting sequence/synthetic sequence
PELQLEESCAEAQDGELDGL

SEQ ID NO: 8510 - protein, 20 aa, Artificial Sequence
  Description of Artificial Sequence: targeting sequence/synthetic sequence
VRPGYPKLIRDVWGIEGPID

SEQ ID NO: 8511 - protein, 20 aa, Artificial Sequence
  Description of Artificial Sequence: targeting sequence/synthetic sequence
KSEDKKKSEEDHTEEINDKI

SEQ ID NO: 8512 - protein, 20 aa, Artificial Sequence
  Description of Artificial Sequence: targeting sequence/synthetic sequence
ETSEAEIHQSFQHLLRTLNQ

SEQ ID NO: 8513 - protein, 20 aa, Artificial Sequence
  Description of Artificial Sequence: targeting sequence/synthetic sequence
LPQDGTSTLRENSKPEESHL

SEQ ID NO: 8514 - protein, 20 aa, Artificial Sequence
  Description of Artificial Sequence: targeting sequence/synthetic sequence
EKGEKGDPGLIGPKGDIGET

SEQ ID NO: 8515 - protein, 20 aa, Artificial Sequence
  Description of Artificial Sequence: targeting sequence/synthetic sequence
AYVHDAPVRSLNCTLRDSQQ

SEQ ID NO: 8516 - protein, 20 aa, Artificial Sequence
  Description of Artificial Sequence: targeting sequence/synthetic sequence
DAPILPVSPIWEPPPATTST

SEQ ID NO: 8517 - protein, 20 aa, Artificial Sequence
  Description of Artificial Sequence: targeting sequence/synthetic sequence
IDECQLGVHSCGENASCTNT

SEQ ID NO: 8518 - protein, 20 aa, Artificial Sequence
  Description of Artificial Sequence: targeting sequence/synthetic sequence
EEKDPGMGAMGGMGGGMGGG

SEQ ID NO: 8519 - protein, 20 aa, Artificial Sequence
  Description of Artificial Sequence: targeting sequence/synthetic sequence
WEKIRLRPGGKKKYRLKHLV

SEQ ID NO: 8520 - protein, 20 aa, Artificial Sequence
  Description of Artificial Sequence: targeting sequence/synthetic sequence
KPKILLLDEATSALDNDSEK

SEQ ID NO: 8521 - protein, 20 aa, Artificial Sequence
  Description of Artificial Sequence: targeting sequence/synthetic sequence
THSSAKPCGQQSIHLGGVFE

SEQ ID NO: 8522 - protein, 20 aa, Artificial Sequence
  Description of Artificial Sequence: targeting sequence/synthetic sequence
LNYCEEAVEEETGDGLDEDS

SEQ ID NO: 8523 - protein, 20 aa, Artificial Sequence
  Description of Artificial Sequence: targeting sequence/synthetic sequence
TSQEPPDTTSQEPPDTTSQE

SEQ ID NO: 8524 - protein, 20 aa, Artificial Sequence
  Description of Artificial Sequence: targeting sequence/synthetic sequence
GEGGAGADEEKEQSHRPFLM

SEQ ID NO: 8525 - protein, 20 aa, Artificial Sequence
  Description of Artificial Sequence: targeting sequence/synthetic sequence
KEEKKSEDKKKSEEDHTEEI

SEQ ID NO: 8526 - protein, 20 aa, Artificial Sequence
  Description of Artificial Sequence: targeting sequence/synthetic sequence
RHEMKNPEASKLNKRDGCSS

SEQ ID NO: 8527 - protein, 20 aa, Artificial Sequence
  Description of Artificial Sequence: targeting sequence/synthetic sequence
GWASQRWLFRNDGSIYNLHD

SEQ ID NO: 8528 - protein, 20 aa, Artificial Sequence
  Description of Artificial Sequence: targeting sequence/synthetic sequence
SQGLVCPMSVDQKDTTPYSS

SEQ ID NO: 8529 - protein, 20 aa, Artificial Sequence
  Description of Artificial Sequence: targeting sequence/synthetic sequence
IPWPEGEEKLSDNAQSAVEI

SEQ ID NO: 8530 - protein, 20 aa, Artificial Sequence
  Description of Artificial Sequence: targeting sequence/synthetic sequence
YQILRGLKYIHSADIIHRDL

SEQ ID NO: 8531 - protein, 20 aa, Artificial Sequence
  Description of Artificial Sequence: targeting sequence/synthetic sequence
EYQFQHQPSQEECEGSSLSA

SEQ ID NO: 8532 - protein, 20 aa, Artificial Sequence
  Description of Artificial Sequence: targeting sequence/synthetic sequence
CFSDSIPTPSNMEETQQKSN

SEQ ID NO: 8533 - protein, 20 aa, Artificial Sequence
  Description of Artificial Sequence: targeting sequence/synthetic sequence
LCSDSEEEMKALEADFLTNM

SEQ ID NO: 8534 - protein, 20 aa, Artificial Sequence
  Description of Artificial Sequence: targeting sequence/synthetic sequence
RRERKAAFKGDSGGPLLCNN

SEQ ID NO: 8535 - protein, 20 aa, Artificial Sequence
  Description of Artificial Sequence: targeting sequence/synthetic sequence
MEAQTTAPEATEAQTTQPTA

SEQ ID NO: 8536 - protein, 20 aa, Artificial Sequence
  Description of Artificial Sequence: targeting sequence/synthetic sequence
APEATEAQTTQPTATEAQTT

SEQ ID NO: 8537 - protein, 20 aa, Artificial Sequence
  Description of Artificial Sequence: targeting sequence/synthetic sequence
AQFKPHTDEDLVYLEPSPDF

SEQ ID NO: 8538 - protein, 20 aa, Artificial Sequence
  Description of Artificial Sequence: targeting sequence/synthetic sequence
TSEPHAQLEENFCRNPDGDS

SEQ ID NO: 8539 - protein, 20 aa, Artificial Sequence
  Description of Artificial Sequence: targeting sequence/synthetic sequence
DDQPPSILDPPDQVQFEKCG

SEQ ID NO: 8540 - protein, 20 aa, Artificial Sequence
  Description of Artificial Sequence: targeting sequence/synthetic sequence
GYCDLNYCEEAVEEETGDGL

SEQ ID NO: 8541 - protein, 20 aa, Artificial Sequence
  Description of Artificial Sequence: targeting sequence/synthetic sequence
FQKLPEEEPETDLSPGLPAA

SEQ ID NO: 8542 - protein, 20 aa, Artificial Sequence
  Description of Artificial Sequence: targeting sequence/synthetic sequence
KLPEEEPETDLSPGLPAAHL

SEQ ID NO: 8543 - protein, 20 aa, Artificial Sequence
  Description of Artificial Sequence: targeting sequence/synthetic sequence
PSTQLSADPSLDGLPAAEDM

SEQ ID NO: 8544 - protein, 20 aa, Artificial Sequence
  Description of Artificial Sequence: targeting sequence/synthetic sequence
SEGGCPLILTQELGKANTTD

SEQ ID NO: 8545 - protein, 20 aa, Artificial Sequence
  Description of Artificial Sequence: targeting sequence/synthetic sequence
VCRCSEGYQGDGIHCLDIDE

SEQ ID NO: 8546 - protein, 20 aa, Artificial Sequence
  Description of Artificial Sequence: targeting sequence/synthetic sequence
QPDSSTLPPPWSPRPLEATA

SEQ ID NO: 8547 - protein, 20 aa, Artificial Sequence
  Description of Artificial Sequence: targeting sequence/synthetic sequence
GVSCQETAVTQTYGGNSNGE

SEQ ID NO: 8548 - protein, 20 aa, Artificial Sequence
  Description of Artificial Sequence: targeting sequence/synthetic sequence
STFESKSYKMADEAGSEADH

SEQ ID NO: 8549 - protein, 20 aa, Artificial Sequence
  Description of Artificial Sequence: targeting sequence/synthetic sequence
AVPDAPILPVSPIWEPPPAT

SEQ ID NO: 8550 - protein, 20 aa, Artificial Sequence
  Description of Artificial Sequence: targeting sequence/synthetic sequence
ICSAEGEPSAAPTDVKATSV

SEQ ID NO: 8551 - protein, 20 aa, Artificial Sequence
  Description of Artificial Sequence: targeting sequence/synthetic sequence
EPSAAPTDVKATSVSVSEIL

SEQ ID NO: 8552 - protein, 20 aa, Artificial Sequence
  Description of Artificial Sequence: targeting sequence/synthetic sequence
GEDDAALRAGSRGLSDPWAD

SEQ ID NO: 8553 - protein, 20 aa, Artificial Sequence
  Description of Artificial Sequence: targeting sequence/synthetic sequence
PVLHSPTSPEPPDTTSPEPP

SEQ ID NO: 8554 - protein, 20 aa, Artificial Sequence
  Description of Artificial Sequence: targeting sequence/synthetic sequence
HSPTSPEPPDTTSPEPPNTT

SEQ ID NO: 8555 - protein, 20 aa, Artificial Sequence
  Description of Artificial Sequence: targeting sequence/synthetic sequence
PTSPEPPDTTSPEPPNTTSP

SEQ ID NO: 8556 - protein, 20 aa, Artificial Sequence
  Description of Artificial Sequence: targeting sequence/synthetic sequence
PEPPDTTSPEPPNTTSPESP

SEQ ID NO: 8557 - protein, 20 aa, Artificial Sequence
  Description of Artificial Sequence: targeting sequence/synthetic sequence
SPESPDTTSQEPPDTTSQEP

SEQ ID NO: 8558 - protein, 20 aa, Artificial Sequence
  Description of Artificial Sequence: targeting sequence/synthetic sequence
QEPPDTTSPEPPDKTSPEPA

SEQ ID NO: 8559 - protein, 20 aa, Artificial Sequence
  Description of Artificial Sequence: targeting sequence/synthetic sequence
GPPGDQGPPGIPGQPGFIGE

SEQ ID NO: 8560 - protein, 20 aa, Artificial Sequence
  Description of Artificial Sequence: targeting sequence/synthetic sequence
EKGSRGDPGTPGVPGKDGQA

SEQ ID NO: 8561 - protein, 20 aa, Artificial Sequence
  Description of Artificial Sequence: targeting sequence/synthetic sequence
GLRGEKGDQGIAGFPGSPGE

SEQ ID NO: 8562 - protein, 20 aa, Artificial Sequence
  Description of Artificial Sequence: targeting sequence/synthetic sequence
CLTGSEELYTIHPTPPAGDG

SEQ ID NO: 8563 - protein, 20 aa, Artificial Sequence
  Description of Artificial Sequence: targeting sequence/synthetic sequence
MDSTVTPAPSDASGIWEPGS

SEQ ID NO: 8564 - protein, 20 aa, Artificial Sequence
  Description of Artificial Sequence: targeting sequence/synthetic sequence
VTPAPSDASGIWEPGSQVFE

SEQ ID NO: 8565 - protein, 20 aa, Artificial Sequence
  Description of Artificial Sequence: targeting sequence/synthetic sequence
APSDASGIWEPGSQVFEEAE

SEQ ID NO: 8566 - protein, 20 aa, Artificial Sequence
  Description of Artificial Sequence: targeting sequence/synthetic sequence
EDECEAPLVCRAGCSPEHGF

SEQ ID NO: 8567 - protein, 20 aa, Artificial Sequence
  Description of Artificial Sequence: targeting sequence/synthetic sequence
HTVENGTGPSSAPDRGVNGT

SEQ ID NO: 8568 - protein, 20 aa, Artificial Sequence
  Description of Artificial Sequence: targeting sequence/synthetic sequence
WERIRLRPGSKKAYRLKHLV

SEQ ID NO: 8569 - protein, 20 aa, Artificial Sequence
  Description of Artificial Sequence: targeting sequence/synthetic sequence
VTTEAAFGLVCATCEQIADS

SEQ ID NO: 8570 - protein, 20 aa, Artificial Sequence
  Description of Artificial Sequence: targeting sequence/synthetic sequence
TTEAAFGLVCATCEQIADSQ

SEQ ID NO: 8571 - protein, 20 aa, Artificial Sequence
  Description of Artificial Sequence: targeting sequence/synthetic sequence
ATCEQIADSQHQSHRQMVTT

SEQ ID NO: 8572 - protein, 20 aa, Artificial Sequence
  Description of Artificial Sequence: targeting sequence/synthetic sequence
KEKEKEEQEERETKTPECPS

SEQ ID NO: 8573 - protein, 20 aa, Artificial Sequence
  Description of Artificial Sequence: targeting sequence/synthetic sequence
KDLHPLFDETFEFLVPAEPC

SEQ ID NO: 8574 - protein, 20 aa, Artificial Sequence
  Description of Artificial Sequence: targeting sequence/synthetic sequence
PAPIEKTISKTKGQPREPQV

SEQ ID NO: 8575 - protein, 20 aa, Artificial Sequence
  Description of Artificial Sequence: targeting sequence/synthetic sequence
LTTAGVAMGTASLTLSAQSR

SEQ ID NO: 8576 - protein, 20 aa, Artificial Sequence
  Description of Artificial Sequence: targeting sequence/synthetic sequence
EDSGHETGIDSQSQGSFQAP

SEQ ID NO: 8577 - protein, 20 aa, Artificial Sequence
  Description of Artificial Sequence: targeting sequence/synthetic sequence
QGQDDLLENIKRKVSSSKPE

SEQ ID NO: 8578 - protein, 20 aa, Artificial Sequence
  Description of Artificial Sequence: targeting sequence/synthetic sequence
FLATAGSAMGGASLTLSAQS

SEQ ID NO: 8579 - protein, 20 aa, Artificial Sequence
  Description of Artificial Sequence: targeting sequence/synthetic sequence
PTEIVQTNGETEPAPLETKP

SEQ ID NO: 8580 - protein, 20 aa, Artificial Sequence
  Description of Artificial Sequence: targeting sequence/synthetic sequence
GNPGADGQPGAKGANGAPGI

SEQ ID NO: 8581 - protein, 20 aa, Artificial Sequence
  Description of Artificial Sequence: targeting sequence/synthetic sequence
PGPIGNVGAPGAKGARGSAG

SEQ ID NO: 8582 - protein, 20 aa, Artificial Sequence
  Description of Artificial Sequence: targeting sequence/synthetic sequence
EELGAVTVKASYRASEQKLR

SEQ ID NO: 8583 - protein, 20 aa, Artificial Sequence
  Description of Artificial Sequence: targeting sequence/synthetic sequence
LAEDPQGDAAQKTDTSHHDQ

SEQ ID NO: 8584 - protein, 20 aa, Artificial Sequence
  Description of Artificial Sequence: targeting sequence/synthetic sequence
PGPKGAAGEPGKAGERGVPG

SEQ ID NO: 8585 - protein, 20 aa, Artificial Sequence
  Description of Artificial Sequence: targeting sequence/synthetic sequence
VMGPNATAEEGAPSAAALAT

SEQ ID NO: 8586 - protein, 20 aa, Artificial Sequence
  Description of Artificial Sequence: targeting sequence/synthetic sequence
NCRHERDAGVVCTNETRSTH

SEQ ID NO: 8587 - protein, 20 aa, Artificial Sequence
  Description of Artificial Sequence: targeting sequence/synthetic sequence
VDPKSKEEDKHLKFRISHEL

SEQ ID NO: 8588 - protein, 20 aa, Artificial Sequence
  Description of Artificial Sequence: targeting sequence/synthetic sequence
PQDSSLVETPPAENKPRKRQ

SEQ ID NO: 8589 - protein, 20 aa, Artificial Sequence
  Description of Artificial Sequence: targeting sequence/synthetic sequence
PIEKTISKTKGQPREPQVYT

SEQ ID NO: 8590 - protein, 20 aa, Artificial Sequence
  Description of Artificial Sequence: targeting sequence/synthetic sequence
VAKRVQDHTTVVGDVVSPEM

SEQ ID NO: 8591 - protein, 20 aa, Artificial Sequence
  Description of Artificial Sequence: targeting sequence/synthetic sequence
SKVLQIEKEGAIHREELVYE

SEQ ID NO: 8592 - protein, 20 aa, Artificial Sequence
  Description of Artificial Sequence: targeting sequence/synthetic sequence
ADSFVIRGDEVRQIAPGQTG

SEQ ID NO: 8593 - protein, 20 aa, Artificial Sequence
  Description of Artificial Sequence: targeting sequence/synthetic sequence
TSEELGAVTVKASYRASEQK

SEQ ID NO: 8594 - protein, 20 aa, Artificial Sequence
  Description of Artificial Sequence: targeting sequence/synthetic sequence
CRHERDAGVVCTNETRSTHT

SEQ ID NO: 8595 - protein, 20 aa, Artificial Sequence
  Description of Artificial Sequence: targeting sequence/synthetic sequence
REREVDNNREPHSAESDVTR

SEQ ID NO: 8596 - protein, 20 aa, Artificial Sequence
  Description of Artificial Sequence: targeting sequence/synthetic sequence
TTAGGTAEVAPDAVPRSGRS

SEQ ID NO: 8597 - protein, 20 aa, Artificial Sequence
  Description of Artificial Sequence: targeting sequence/synthetic sequence
FPVGDAVSKVLQIEKEGAIH

SEQ ID NO: 8598 - protein, 20 aa, Artificial Sequence
  Description of Artificial Sequence: targeting sequence/synthetic sequence
PVSTKPVEDDVDVASERQRV

SEQ ID NO: 8599 - protein, 20 aa, Artificial Sequence
  Description of Artificial Sequence: targeting sequence/synthetic sequence
KRVQDHTTVVGDVVSPEMGE

SEQ ID NO: 8600 - protein, 20 aa, Artificial Sequence
  Description of Artificial Sequence: targeting sequence/synthetic sequence
KVTTNGPTEIVQTNGETEPA

SEQ ID NO: 8601 - protein, 20 aa, Artificial Sequence
  Description of Artificial Sequence: targeting sequence/synthetic sequence
LTLAAPGEVRGPEGEQQDAG

SEQ ID NO: 8602 - protein, 20 aa, Artificial Sequence
  Description of Artificial Sequence: targeting sequence/synthetic sequence
MAHVSVVPVSSEGTPSREPV

SEQ ID NO: 8603 - protein, 20 aa, Artificial Sequence
  Description of Artificial Sequence: targeting sequence/synthetic sequence
GPQPAEGPQTAEGPQPPERK

SEQ ID NO: 8604 - protein, 20 aa, Artificial Sequence
  Description of Artificial Sequence: targeting sequence/synthetic sequence
GDAVSKVLQIEKEGAIHREE

SEQ ID NO: 8605 - protein, 20 aa, Artificial Sequence
  Description of Artificial Sequence: targeting sequence/synthetic sequence
APSLSGKGNPEEEDVDTSQV

SEQ ID NO: 8606 - protein, 20 aa, Artificial Sequence
  Description of Artificial Sequence: targeting sequence/synthetic sequence
STKPVEDDVDVASERQRVLR

SEQ ID NO: 8607 - protein, 20 aa, Artificial Sequence
  Description of Artificial Sequence: targeting sequence/synthetic sequence
AGPAGNPGADGQPGAKGANG

SEQ ID NO: 8608 - protein, 20 aa, Artificial Sequence
  Description of Artificial Sequence: targeting sequence/synthetic sequence
TQQPQQDEMPSPTLLTQVKE

SEQ ID NO: 8609 - protein, 20 aa, Artificial Sequence
  Description of Artificial Sequence: targeting sequence/synthetic sequence
ATTTAPSLSGKGNPEEEDVD

SEQ ID NO: 8610 - protein, 20 aa, Artificial Sequence
  Description of Artificial Sequence: targeting sequence/synthetic sequence
RGANGAPGNDGAKGDAGAPG

SEQ ID NO: 8611 - protein, 20 aa, Artificial Sequence
  Description of Artificial Sequence: targeting sequence/synthetic sequence
FKQGQDDLLENIKRKVSSSK

SEQ ID NO: 8612 - protein, 20 aa, Artificial Sequence
  Description of Artificial Sequence: targeting sequence/synthetic sequence
ESASEDCMAKELPEHTVKLC

SEQ ID NO: 8613 - protein, 20 aa, Artificial Sequence
  Description of Artificial Sequence: targeting sequence/synthetic sequence
RVTTVASHTSDSDVPSGVTE

SEQ ID NO: 8614 - protein, 20 aa, Artificial Sequence
  Description of Artificial Sequence: targeting sequence/synthetic sequence
GSMAHVSVVPVSSEGTPSRE

SEQ ID NO: 8615 - protein, 20 aa, Artificial Sequence
  Description of Artificial Sequence: targeting sequence/synthetic sequence
LAAPGEVRGPEGEQQDAGDF

SEQ ID NO: 8616 - protein, 20 aa, Artificial Sequence
  Description of Artificial Sequence: targeting sequence/synthetic sequence
TTVASHTSDSDVPSGVTEVV

SEQ ID NO: 8617 - protein, 20 aa, Artificial Sequence
  Description of Artificial Sequence: targeting sequence/synthetic sequence
TERTVDKSTEGEVSADEEGF

SEQ ID NO: 8618 - protein, 20 aa, Artificial Sequence
  Description of Artificial Sequence: targeting sequence/synthetic sequence
EDPQGDAAQKTDTSHHDQDH

SEQ ID NO: 8619 - protein, 20 aa, Artificial Sequence
  Description of Artificial Sequence: targeting sequence/synthetic sequence
GAAGARGNDGARGSDGQPGP

SEQ ID NO: 8620 - protein, 20 aa, Artificial Sequence
  Description of Artificial Sequence: targeting sequence/synthetic sequence
GEKNMEDSGHETGIDSQSQG

SEQ ID NO: 8621 - protein, 20 aa, Artificial Sequence
  Description of Artificial Sequence: targeting sequence/synthetic sequence
KSKEEDKHLKFRISHELDSA

SEQ ID NO: 8622 - protein, 20 aa, Artificial Sequence
  Description of Artificial Sequence: targeting sequence/synthetic sequence
EKVTTNGPTEIVQTNGETEP

SEQ ID NO: 8623 - protein, 20 aa, Artificial Sequence
  Description of Artificial Sequence: targeting sequence/synthetic sequence
PLPQDSSLVETPPAENKPRK

SEQ ID NO: 8624 - protein, 20 aa, Artificial Sequence
  Description of Artificial Sequence: targeting sequence/synthetic sequence
PGLPGPSGEPGKQGPSGASG

SEQ ID NO: 8625 - protein, 20 aa, Artificial Sequence
  Description of Artificial Sequence: targeting sequence/synthetic sequence
AAGPAGNPGADGQPGAKGAN

SEQ ID NO: 8626 - protein, 20 aa, Artificial Sequence
  Description of Artificial Sequence: targeting sequence/synthetic sequence
PGAASAAAASAEEGTAAAAA

SEQ ID NO: 8627 - protein, 20 aa, Artificial Sequence
  Description of Artificial Sequence: targeting sequence/synthetic sequence
AGPCEQAECGSGGSGSGEDG

SEQ ID NO: 8628 - protein, 20 aa, Artificial Sequence
  Description of Artificial Sequence: targeting sequence/synthetic sequence
AASPPGAASAAAASAEEGTA

SEQ ID NO: 8629 - protein, 20 aa, Artificial Sequence
  Description of Artificial Sequence: targeting sequence/synthetic sequence
EAGESSHEEDTDGHVAAGST

SEQ ID NO: 8630 - protein, 20 aa, Artificial Sequence
  Description of Artificial Sequence: targeting sequence/synthetic sequence
TQHEAGSTSWDGSLSPQAAT

SEQ ID NO: 8631 - protein, 20 aa, Artificial Sequence
  Description of Artificial Sequence: targeting sequence/synthetic sequence
PQQDEMPSPTLLTQVKESLS

SEQ ID NO: 8632 - protein, 20 aa, Artificial Sequence
  Description of Artificial Sequence: targeting sequence/synthetic sequence
ADSFVVKGDDVRQIAPGQTG

SEQ ID NO: 8633 - protein, 20 aa, Artificial Sequence
  Description of Artificial Sequence: targeting sequence/synthetic sequence
TSQDREREVDNNREPHSAES

SEQ ID NO: 8634 - protein, 20 aa, Artificial Sequence
  Description of Artificial Sequence: targeting sequence/synthetic sequence
DAVSKVLQIEKEGAIHREEL

SEQ ID NO: 8635 - protein, 20 aa, Artificial Sequence
  Description of Artificial Sequence: targeting sequence/synthetic sequence
CESASEDCMAKELPEHTVKL

SEQ ID NO: 8636 - protein, 20 aa, Artificial Sequence
  Description of Artificial Sequence: targeting sequence/synthetic sequence
PVSLAEDPQGDAAQKTDTSH

SEQ ID NO: 8637 - protein, 20 aa, Artificial Sequence
  Description of Artificial Sequence: targeting sequence/synthetic sequence
SHEVTQHEAGSTSWDGSLSP

SEQ ID NO: 8638 - protein, 20 aa, Artificial Sequence
  Description of Artificial Sequence: targeting sequence/synthetic sequence
EKNMEDSGHETGIDSQSQGS

SEQ ID NO: 8639 - protein, 20 aa, Artificial Sequence
  Description of Artificial Sequence: targeting sequence/synthetic sequence
EREVDNNREPHSAESDVTRF

SEQ ID NO: 8640 - protein, 20 aa, Artificial Sequence
  Description of Artificial Sequence: targeting sequence/synthetic sequence
HEHEHEHEHEGGGGGKLALK

SEQ ID NO: 8641 - protein, 20 aa, Artificial Sequence
  Description of Artificial Sequence: targeting sequence/synthetic sequence
TTAPSLSGKGNPEEEDVDTS

SEQ ID NO: 8642 - protein, 20 aa, Artificial Sequence
  Description of Artificial Sequence: targeting sequence/synthetic sequence
PGEAGLPGAKGLTGSPGSPG

SEQ ID NO: 8643 - protein, 20 aa, Artificial Sequence
  Description of Artificial Sequence: targeting sequence/synthetic sequence
DPQGDAAQKTDTSHHDQDHP

SEQ ID NO: 8644 - protein, 20 aa, Artificial Sequence
  Description of Artificial Sequence: targeting sequence/synthetic sequence
RTVDKSTEGEVSADEEGFEN

SEQ ID NO: 8645 - protein, 20 aa, Artificial Sequence
  Description of Artificial Sequence: targeting sequence/synthetic sequence
PNATAEEGAPSAAALATPDT

SEQ ID NO: 8646 - protein, 20 aa, Artificial Sequence
  Description of Artificial Sequence: targeting sequence/synthetic sequence
ATAEEGAPSAAALATPDTLQ

SEQ ID NO: 8647 - protein, 20 aa, Artificial Sequence
  Description of Artificial Sequence: targeting sequence/synthetic sequence
VTTNGPTEIVQTNGETEPAP

SEQ ID NO: 8648 - protein, 20 aa, Artificial Sequence
  Description of Artificial Sequence: targeting sequence/synthetic sequence
DHTTVVGDVVSPEMGESLFQ

SEQ ID NO: 8649 - protein, 20 aa, Artificial Sequence
  Description of Artificial Sequence: targeting sequence/synthetic sequence
TNGPTEIVQTNGETEPAPLE

SEQ ID NO: 8650 - protein, 20 aa, Artificial Sequence
  Description of Artificial Sequence: targeting sequence/synthetic sequence
EVTTTAGGTAEVAPDAVPRS

SEQ ID NO: 8651 - protein, 20 aa, Artificial Sequence
  Description of Artificial Sequence: targeting sequence/synthetic sequence
GVLCELAQDKEAAEAIEAEG

SEQ ID NO: 8652 - protein, 20 aa, Artificial Sequence
  Description of Artificial Sequence: targeting sequence/synthetic sequence
RVTERTVDKSTEGEVSADEE

SEQ ID NO: 8653 - protein, 20 aa, Artificial Sequence
  Description of Artificial Sequence: targeting sequence/synthetic sequence
EHEHEHEHEHEHEGGGGGKL

SEQ ID NO: 8654 - protein, 20 aa, Artificial Sequence
  Description of Artificial Sequence: targeting sequence/synthetic sequence
PPAKKAAESSSDSSDSDSSE

SEQ ID NO: 8655 - protein, 20 aa, Artificial Sequence
  Description of Artificial Sequence: targeting sequence/synthetic sequence
AKKAAESSSDSSDSDSSEDD

SEQ ID NO: 8656 - protein, 20 aa, Artificial Sequence
  Description of Artificial Sequence: targeting sequence/synthetic sequence
EEARAGPCEQAECGSGGSGS

SEQ ID NO: 8657 - protein, 20 aa, Artificial Sequence
  Description of Artificial Sequence: targeting sequence/synthetic sequence
PSTQDPSTQASTASSPAPEE

SEQ ID NO: 8658 - protein, 20 aa, Artificial Sequence
  Description of Artificial Sequence: targeting sequence/synthetic sequence
HEHEHEHEHEHEGGGGGKLA

SEQ ID NO: 8659 - protein, 20 aa, Artificial Sequence
  Description of Artificial Sequence: targeting sequence/synthetic sequence
PGPAGQPGDKGEGGAPGLPG

SEQ ID NO: 8660 - protein, 20 aa, Artificial Sequence
  Description of Artificial Sequence: targeting sequence/synthetic sequence
PALPEDGGSGAFPPGHFKDP

SEQ ID NO: 8661 - protein, 20 aa, Artificial Sequence
  Description of Artificial Sequence: targeting sequence/synthetic sequence
TTLPALPEDGGSGAFPPGHF

SEQ ID NO: 8662 - protein, 20 aa, Artificial Sequence
  Description of Artificial Sequence: targeting sequence/synthetic sequence
AVSKVLQIEKEGAIHREELV

SEQ ID NO: 8663 - protein, 20 aa, Artificial Sequence
  Description of Artificial Sequence: targeting sequence/synthetic sequence
TEAGESSHEEDTDGHVAAGS

SEQ ID NO: 8664 - protein, 20 aa, Artificial Sequence
  Description of Artificial Sequence: targeting sequence/synthetic sequence
TQDPSTQASTASSPAPEENA

SEQ ID NO: 8665 - protein, 20 aa, Artificial Sequence
  Description of Artificial Sequence: targeting sequence/synthetic sequence
DGGEKNMEDSGHETGIDSQS

SEQ ID NO: 8666 - protein, 20 aa, Artificial Sequence
  Description of Artificial Sequence: targeting sequence/synthetic sequence
EGPQPAEGPQTAEGPQPPER

SEQ ID NO: 8667 - protein, 20 aa, Artificial Sequence
  Description of Artificial Sequence: targeting sequence/synthetic sequence
PAPLNADSEEDEEHTIITDT

SEQ ID NO: 8668 - protein, 20 aa, Artificial Sequence
  Description of Artificial Sequence: targeting sequence/synthetic sequence
EPTKEPIVDEDDDVAEERQR

SEQ ID NO: 8669 - protein, 20 aa, Artificial Sequence
  Description of Artificial Sequence: targeting sequence/synthetic sequence
PLNADSEEDEEHTIITDTEL

SEQ ID NO: 8670 - protein, 20 aa, Artificial Sequence
  Description of Artificial Sequence: targeting sequence/synthetic sequence
ENVIRDAVTYTEHAKRKTVT

SEQ ID NO: 8671 - protein, 20 aa, Artificial Sequence
  Description of Artificial Sequence: targeting sequence/synthetic sequence
QQSAEFVNDLKRANSNLVAA

SEQ ID NO: 8672 - protein, 20 aa, Artificial Sequence
  Description of Artificial Sequence: targeting sequence/synthetic sequence
FVQNALNGNGDPNNMDKAIK

SEQ ID NO: 8673 - protein, 20 aa, Artificial Sequence
  Description of Artificial Sequence: targeting sequence/synthetic sequence
QSSKSANTITSFVDRGLDDL

SEQ ID NO: 8674 - protein, 20 aa, Artificial Sequence
  Description of Artificial Sequence: targeting sequence/synthetic sequence
KQLINLKEINANVVSSPGLL

SEQ ID NO: 8675 - protein, 20 aa, Artificial Sequence
  Description of Artificial Sequence: targeting sequence/synthetic sequence
KITNLMTGQTANATSLLGTM

SEQ ID NO: 8676 - protein, 20 aa, Artificial Sequence
  Description of Artificial Sequence: targeting sequence/synthetic sequence
IRHQQSAEFVNDLKRANSNL

SEQ ID NO: 8677 - protein, 20 aa, Artificial Sequence
  Description of Artificial Sequence: targeting sequence/synthetic sequence
SEREAQFVLRNEIQRDSALT

SEQ ID NO: 8678 - protein, 20 aa, Artificial Sequence
  Description of Artificial Sequence: targeting sequence/synthetic sequence
NQTQDPSRNELQVPRSFVDR

SEQ ID NO: 8679 - protein, 20 aa, Artificial Sequence
  Description of Artificial Sequence: targeting sequence/synthetic sequence
LNTILPDARDPAFKAANGSL

SEQ ID NO: 8680 - protein, 20 aa, Artificial Sequence
  Description of Artificial Sequence: targeting sequence/synthetic sequence
MLESMIDNTVRETVGAATSR

SEQ ID NO: 8681 - protein, 20 aa, Artificial Sequence
  Description of Artificial Sequence: targeting sequence/synthetic sequence
ELDVNNINMDTDTSQLGFHQ

SEQ ID NO: 8682 - protein, 20 aa, Artificial Sequence
  Description of Artificial Sequence: targeting sequence/synthetic sequence
ALHQSMLNSQAIDNLRASLE

SEQ ID NO: 8683 - protein, 20 aa, Artificial Sequence
  Description of Artificial Sequence: targeting sequence/synthetic sequence
TQDPSRNELQVPRSFVDRVV

SEQ ID NO: 8684 - protein, 20 aa, Artificial Sequence
  Description of Artificial Sequence: targeting sequence/synthetic sequence
QLNTILPDARDPAFKAANGS

SEQ ID NO: 8685 - protein, 20 aa, Artificial Sequence
  Description of Artificial Sequence: targeting sequence/synthetic sequence
NVLNGLAGNDVLSGGAGDDV

SEQ ID NO: 8686 - protein, 20 aa, Artificial Sequence
  Description of Artificial Sequence: targeting sequence/synthetic sequence
EVHNAKTKPREEQFNSTFRV

SEQ ID NO: 8687 - protein, 20 aa, Artificial Sequence
  Description of Artificial Sequence: targeting sequence/synthetic sequence
RFVQNALNGNGDPNNMDKAI

SEQ ID NO: 8688 - protein, 20 aa, Artificial Sequence
  Description of Artificial Sequence: targeting sequence/synthetic sequence
HLNPAIESDNNFTDTTKIFH

SEQ ID NO: 8689 - protein, 20 aa, Artificial Sequence
  Description of Artificial Sequence: targeting sequence/synthetic sequence
NALNGNGDSNNMDRAVKLYR

SEQ ID NO: 8690 - protein, 20 aa, Artificial Sequence
  Description of Artificial Sequence: targeting sequence/synthetic sequence
RVDPTVENEETFMNRVEVKV

SEQ ID NO: 8691 - protein, 20 aa, Artificial Sequence
  Description of Artificial Sequence: targeting sequence/synthetic sequence
LSAELRNQLDVAKVSQQLGL

SEQ ID NO: 8692 - protein, 20 aa, Artificial Sequence
  Description of Artificial Sequence: targeting sequence/synthetic sequence
ASGSGGHNTMPSGGNSVSSG

SEQ ID NO: 8693 - protein, 20 aa, Artificial Sequence
  Description of Artificial Sequence: targeting sequence/synthetic sequence
LLADVKGARAALNEIESRHR

SEQ ID NO: 8694 - protein, 20 aa, Artificial Sequence
  Description of Artificial Sequence: targeting sequence/synthetic sequence
KSANTITSFVDRGLDDLSHT

SEQ ID NO: 8695 - protein, 20 aa, Artificial Sequence
  Description of Artificial Sequence: targeting sequence/synthetic sequence
IGPALNVGNETAKENFKNAF

SEQ ID NO: 8696 - protein, 20 aa, Artificial Sequence
  Description of Artificial Sequence: targeting sequence/synthetic sequence
SGQQIVGPPRKKSPNELVDD

SEQ ID NO: 8697 - protein, 20 aa, Artificial Sequence
  Description of Artificial Sequence: targeting sequence/synthetic sequence
NSKNTLSLQMNSLRVEDTAV

SEQ ID NO: 8698 - protein, 20 aa, Artificial Sequence
  Description of Artificial Sequence: targeting sequence/synthetic sequence
AAELQNDVRQAVEGAIGRVA

SEQ ID NO: 8699 - protein, 20 aa, Artificial Sequence
  Description of Artificial Sequence: targeting sequence/synthetic sequence
IVNANTVLDDLNSRMPQSRH

SEQ ID NO: 8700 - protein, 20 aa, Artificial Sequence
  Description of Artificial Sequence: targeting sequence/synthetic sequence
SQPLFNDIAAGIPSITAYSK

SEQ ID NO: 8701 - protein, 20 aa, Artificial Sequence
  Description of Artificial Sequence: targeting sequence/synthetic sequence
APEKTKPPLPSVQKLVEDRW

SEQ ID NO: 8702 - protein, 20 aa, Artificial Sequence
  Description of Artificial Sequence: targeting sequence/synthetic sequence
TKAPVDLLGVAHNNLMAMAQ

SEQ ID NO: 8703 - protein, 20 aa, Artificial Sequence
  Description of Artificial Sequence: targeting sequence/synthetic sequence
GHGKKVADALTNAVAHVDDM

SEQ ID NO: 8704 - protein, 20 aa, Artificial Sequence
  Description of Artificial Sequence: targeting sequence/synthetic sequence
NQHLNPAIESDNNFTDTTKI

SEQ ID NO: 8705 - protein, 20 aa, Artificial Sequence
  Description of Artificial Sequence: targeting sequence/synthetic sequence
RFVQNALNGNGDPNNMDRAV

SEQ ID NO: 8706 - protein, 20 aa, Artificial Sequence
  Description of Artificial Sequence: targeting sequence/synthetic sequence
HRGRTLEIPGNSDPNMIPDG

SEQ ID NO: 8707 - protein, 20 aa, Artificial Sequence
  Description of Artificial Sequence: targeting sequence/synthetic sequence
SSIEKTISKAKGQPREPQVY

SEQ ID NO: 8708 - protein, 20 aa, Artificial Sequence
  Description of Artificial Sequence: targeting sequence/synthetic sequence
LKGLKFNLTETSEAEIHQSF

SEQ ID NO: 8709 - protein, 20 aa, Artificial Sequence
  Description of Artificial Sequence: targeting sequence/synthetic sequence
SLSGSRNGEENIIDNPYLRP

SEQ ID NO: 8710 - protein, 20 aa, Artificial Sequence
  Description of Artificial Sequence: targeting sequence/synthetic sequence
TNSNNHLAADSQAYDQKNIR

SEQ ID NO: 8711 - protein, 20 aa, Artificial Sequence
  Description of Artificial Sequence: targeting sequence/synthetic sequence
KEATEAAKCNLLAEKQYGFC

SEQ ID NO: 8712 - protein, 20 aa, Artificial Sequence
  Description of Artificial Sequence: targeting sequence/synthetic sequence
ENQITAFLGHNGAGKTTTLS

SEQ ID NO: 8713 - protein, 20 aa, Artificial Sequence
  Description of Artificial Sequence: targeting sequence/synthetic sequence
IVGPPRKKSPNELVDDLFKG

SEQ ID NO: 8714 - protein, 20 aa, Artificial Sequence
  Description of Artificial Sequence: targeting sequence/synthetic sequence
VAHVDDMPNALSALSDLHAH

SEQ ID NO: 8715 - protein, 20 aa, Artificial Sequence
  Description of Artificial Sequence: targeting sequence/synthetic sequence
FTNSNNHLAADSQAYDQKNI

SEQ ID NO: 8716 - protein, 20 aa, Artificial Sequence
  Description of Artificial Sequence: targeting sequence/synthetic sequence
LHLQSTDYGNFLANEASPLT

SEQ ID NO: 8717 - protein, 20 aa, Artificial Sequence
  Description of Artificial Sequence: targeting sequence/synthetic sequence
PLTPVNNLPDTRSSGPAHSK

SEQ ID NO: 8718 - protein, 20 aa, Artificial Sequence
  Description of Artificial Sequence: targeting sequence/synthetic sequence
DDSKNSVHLQMNSLKTDDTA

SEQ ID NO: 8719 - protein, 20 aa, Artificial Sequence
  Description of Artificial Sequence: targeting sequence/synthetic sequence
DLFFNEIKARSGQDDKTVYE

SEQ ID NO: 8720 - protein, 20 aa, Artificial Sequence
  Description of Artificial Sequence: targeting sequence/synthetic sequence
TRNALTPLTPVNNLPDTRSS

SEQ ID NO: 8721 - protein, 20 aa, Artificial Sequence
  Description of Artificial Sequence: targeting sequence/synthetic sequence
IDEVLNEVLVVPNIKESHHT

SEQ ID NO: 8722 - protein, 20 aa, Artificial Sequence
  Description of Artificial Sequence: targeting sequence/synthetic sequence
IQAYNEIENVLKSKQIAPEY

SEQ ID NO: 8723 - protein, 20 aa, Artificial Sequence
  Description of Artificial Sequence: targeting sequence/synthetic sequence
AHVDDMPNALSALSDLHAHK

SEQ ID NO: 8724 - protein, 20 aa, Artificial Sequence
  Description of Artificial Sequence: targeting sequence/synthetic sequence
QPSLKTGSEEIRSLYNTVAT

SEQ ID NO: 8725 - protein, 20 aa, Artificial Sequence
  Description of Artificial Sequence: targeting sequence/synthetic sequence
RRFVQNALNGNGDPNNMDKA

SEQ ID NO: 8726 - protein, 20 aa, Artificial Sequence
  Description of Artificial Sequence: targeting sequence/synthetic sequence
SYTQQNYVSEVEQQNSKSVL

SEQ ID NO: 8727 - protein, 20 aa, Artificial Sequence
  Description of Artificial Sequence: targeting sequence/synthetic sequence
ILGSGHYAAGLDLNDTYSGK

SEQ ID NO: 8728 - protein, 20 aa, Artificial Sequence
  Description of Artificial Sequence: targeting sequence/synthetic sequence
LAVKAYNSAGTGPSSATVNV

SEQ ID NO: 8729 - protein, 20 aa, Artificial Sequence
  Description of Artificial Sequence: targeting sequence/synthetic sequence
SVSFNLLEQDPSGATTKSAM

SEQ ID NO: 8730 - protein, 20 aa, Artificial Sequence
  Description of Artificial Sequence: targeting sequence/synthetic sequence
KSEREAQFVLRNEIQRDSAL

SEQ ID NO: 8731 - protein, 20 aa, Artificial Sequence
  Description of Artificial Sequence: targeting sequence/synthetic sequence
LNVIELNVQKTVDYTGQAKA

SEQ ID NO: 8732 - protein, 20 aa, Artificial Sequence
  Description of Artificial Sequence: targeting sequence/synthetic sequence
TEQILAKIPSENNKLTYSHG

SEQ ID NO: 8733 - protein, 20 aa, Artificial Sequence
  Description of Artificial Sequence: targeting sequence/synthetic sequence
SSTNNNQTQDPSRNELQVPR

SEQ ID NO: 8734 - protein, 20 aa, Artificial Sequence
  Description of Artificial Sequence: targeting sequence/synthetic sequence
LTPLTPANNLPDTQSSGPAH

SEQ ID NO: 8735 - protein, 20 aa, Artificial Sequence
  Description of Artificial Sequence: targeting sequence/synthetic sequence
TVSDNELQEMSNQGSKYVNK

SEQ ID NO: 8736 - protein, 20 aa, Artificial Sequence
  Description of Artificial Sequence: targeting sequence/synthetic sequence
MASGSGGHNTMPSGGNSVSS

SEQ ID NO: 8737 - protein, 20 aa, Artificial Sequence
  Description of Artificial Sequence: targeting sequence/synthetic sequence
LNPAIESDNNFTDTTKIFHD

SEQ ID NO: 8738 - protein, 20 aa, Artificial Sequence
  Description of Artificial Sequence: targeting sequence/synthetic sequence
AIVKANANAAAINNLASSIQ

SEQ ID NO: 8739 - protein, 20 aa, Artificial Sequence
  Description of Artificial Sequence: targeting sequence/synthetic sequence
LVEKQADTLNVIELNVQKTV

SEQ ID NO: 8740 - protein, 20 aa, Artificial Sequence
  Description of Artificial Sequence: targeting sequence/synthetic sequence
AVAIVKANANAAAINNLASS

SEQ ID NO: 8741 - protein, 20 aa, Artificial Sequence
  Description of Artificial Sequence: targeting sequence/synthetic sequence
LNNLKQLPLLENQVSNLEQS

SEQ ID NO: 8742 - protein, 20 aa, Artificial Sequence
  Description of Artificial Sequence: targeting sequence/synthetic sequence
MNAIPDLKIVPIDPTKNIVG

SEQ ID NO: 8743 - protein, 20 aa, Artificial Sequence
  Description of Artificial Sequence: targeting sequence/synthetic sequence
HIVKTLRNNKSNMVETLEQY

SEQ ID NO: 8744 - protein, 20 aa, Artificial Sequence
  Description of Artificial Sequence: targeting sequence/synthetic sequence
IMNAIPDLKIVPIDPTKNIV

SEQ ID NO: 8745 - protein, 20 aa, Artificial Sequence
  Description of Artificial Sequence: targeting sequence/synthetic sequence
SLVQAQTNARAIAAMKNSIQ

SEQ ID NO: 8746 - protein, 20 aa, Artificial Sequence
  Description of Artificial Sequence: targeting sequence/synthetic sequence
NPSLSGSRNGEENIIDNPYL

SEQ ID NO: 8747 - protein, 20 aa, Artificial Sequence
  Description of Artificial Sequence: targeting sequence/synthetic sequence
DSLNVIRSAIGTPLQTISSG

SEQ ID NO: 8748 - protein, 20 aa, Artificial Sequence
  Description of Artificial Sequence: targeting sequence/synthetic sequence
VKTHTNISESHPNATFSAVG

SEQ ID NO: 8749 - protein, 20 aa, Artificial Sequence
  Description of Artificial Sequence: targeting sequence/synthetic sequence
LLPHANEVSQKIGDNLRELQ

SEQ ID NO: 8750 - protein, 20 aa, Artificial Sequence
  Description of Artificial Sequence: targeting sequence/synthetic sequence
VGLNLEGNGIATDVPSATKR

SEQ ID NO: 8751 - protein, 20 aa, Artificial Sequence
  Description of Artificial Sequence: targeting sequence/synthetic sequence
LYSSSPRVLSNNSDANLELI

SEQ ID NO: 8752 - protein, 20 aa, Artificial Sequence
  Description of Artificial Sequence: targeting sequence/synthetic sequence
FSENLLADVKGARAALNEIE

SEQ ID NO: 8753 - protein, 20 aa, Artificial Sequence
  Description of Artificial Sequence: targeting sequence/synthetic sequence
FVQNALNGNGDPNNMDRAVK

SEQ ID NO: 8754 - protein, 20 aa, Artificial Sequence
  Description of Artificial Sequence: targeting sequence/synthetic sequence
SSEAMNDILAQVATNTETSK

SEQ ID NO: 8755 - protein, 20 aa, Artificial Sequence
  Description of Artificial Sequence: targeting sequence/synthetic sequence
AAVAIVKANANAAAINNLAS

SEQ ID NO: 8756 - protein, 20 aa, Artificial Sequence
  Description of Artificial Sequence: targeting sequence/synthetic sequence
RLLPHANEVSQKIGDNLREL

SEQ ID NO: 8757 - protein, 20 aa, Artificial Sequence
  Description of Artificial Sequence: targeting sequence/synthetic sequence
NLYWTDTGRNTIEASRLDGS

SEQ ID NO: 8758 - protein, 20 aa, Artificial Sequence
  Description of Artificial Sequence: targeting sequence/synthetic sequence
CAVGDGGNDVSMIQESDCGV

SEQ ID NO: 8759 - protein, 20 aa, Artificial Sequence
  Description of Artificial Sequence: targeting sequence/synthetic sequence
LDGDPHSDYINANYIDGYHR

SEQ ID NO: 8760 - protein, 20 aa, Artificial Sequence
  Description of Artificial Sequence: targeting sequence/synthetic sequence
VSEFTNSNNHLAADSQAYDQ

SEQ ID NO: 8761 - protein, 20 aa, Artificial Sequence
  Description of Artificial Sequence: targeting sequence/synthetic sequence
NNINMDTDTSQLGFHQSNQW

SEQ ID NO: 8762 - protein, 20 aa, Artificial Sequence
  Description of Artificial Sequence: targeting sequence/synthetic sequence
RFVQNALNGNGDSNNMDRAV

SEQ ID NO: 8763 - protein, 20 aa, Artificial Sequence
  Description of Artificial Sequence: targeting sequence/synthetic sequence
NNNQTQDPSRNELQVPRSFV

SEQ ID NO: 8764 - protein, 20 aa, Artificial Sequence
  Description of Artificial Sequence: targeting sequence/synthetic sequence
QAYNEIENVLKSKQIAPEYK

SEQ ID NO: 8765 - protein, 20 aa, Artificial Sequence
  Description of Artificial Sequence: targeting sequence/synthetic sequence
ATNANARAKGGTGQTGGLTQ

SEQ ID NO: 8766 - protein, 20 aa, Artificial Sequence
  Description of Artificial Sequence: targeting sequence/synthetic sequence
GASKLQELHLSSNGLESLSP

SEQ ID NO: 8767 - protein, 20 aa, Artificial Sequence
  Description of Artificial Sequence: targeting sequence/synthetic sequence
NSTQMNMIRDTLGNPTVKDF

SEQ ID NO: 8768 - protein, 20 aa, Artificial Sequence
  Description of Artificial Sequence: targeting sequence/synthetic sequence
VLVEKQADTLNVIELNVQKT

SEQ ID NO: 8769 - protein, 20 aa, Artificial Sequence
  Description of Artificial Sequence: targeting sequence/synthetic sequence
HQQSAEFVNDLKRANSNLVA

SEQ ID NO: 8770 - protein, 20 aa, Artificial Sequence
  Description of Artificial Sequence: targeting sequence/synthetic sequence
GLSAELRNQLDVAKVSQQLG

SEQ ID NO: 8771 - protein, 20 aa, Artificial Sequence
  Description of Artificial Sequence: targeting sequence/synthetic sequence
SANAIETKGFNKKDLELALS

SEQ ID NO: 8772 - protein, 20 aa, Artificial Sequence
  Description of Artificial Sequence: targeting sequence/synthetic sequence
GNEVLTHKTWDGNYQDKTAH

SEQ ID NO: 8773 - protein, 20 aa, Artificial Sequence
  Description of Artificial Sequence: targeting sequence/synthetic sequence
EILKGLKFNLTETSEAEIHQ

SEQ ID NO: 8774 - protein, 20 aa, Artificial Sequence
  Description of Artificial Sequence: targeting sequence/synthetic sequence
SGLSAELRNQLDVAKVSQQL

SEQ ID NO: 8775 - protein, 20 aa, Artificial Sequence
  Description of Artificial Sequence: targeting sequence/synthetic sequence
TNNNQTQDPSRNELQVPRSF

SEQ ID NO: 8776 - protein, 20 aa, Artificial Sequence
  Description of Artificial Sequence: targeting sequence/synthetic sequence
ESIVNANTVLDDLNSRMPQS

SEQ ID NO: 8777 - protein, 20 aa, Artificial Sequence
  Description of Artificial Sequence: targeting sequence/synthetic sequence
SLNNQIESIRSPEGSRKNPA

SEQ ID NO: 8778 - protein, 20 aa, Artificial Sequence
  Description of Artificial Sequence: targeting sequence/synthetic sequence
STMAKSENLVKSHVQLQNYS

SEQ ID NO: 8779 - protein, 20 aa, Artificial Sequence
  Description of Artificial Sequence: targeting sequence/synthetic sequence
SSPRVLSNNSDANLELINTW

SEQ ID NO: 8780 - protein, 20 aa, Artificial Sequence
  Description of Artificial Sequence: targeting sequence/synthetic sequence
LTNKYDIKQIENELNQKVSI

SEQ ID NO: 8781 - protein, 20 aa, Artificial Sequence
  Description of Artificial Sequence: targeting sequence/synthetic sequence
ENIKRKVSSSKPEENKIRQE

SEQ ID NO: 8782 - protein, 20 aa, Artificial Sequence
  Description of Artificial Sequence: targeting sequence/synthetic sequence
KSLVNKGILVQTRGTGASGS

SEQ ID NO: 8783 - protein, 20 aa, Artificial Sequence
  Description of Artificial Sequence: targeting sequence/synthetic sequence
FDNSTQMNMIRDTLGNPTVK

SEQ ID NO: 8784 - protein, 20 aa, Artificial Sequence
  Description of Artificial Sequence: targeting sequence/synthetic sequence
LNQHLNPAIESDNNFTDTTK

SEQ ID NO: 8785 - protein, 20 aa, Artificial Sequence
  Description of Artificial Sequence: targeting sequence/synthetic sequence
HPRLDPEEIQMADYISKNVP

SEQ ID NO: 8786 - protein, 20 aa, Artificial Sequence
  Description of Artificial Sequence: targeting sequence/synthetic sequence
TAVSKVLHLEGEVNKIKSAL

SEQ ID NO: 8787 - protein, 20 aa, Artificial Sequence
  Description of Artificial Sequence: targeting sequence/synthetic sequence
LKQLPLLENQVSNLEQSAAS

SEQ ID NO: 8788 - protein, 20 aa, Artificial Sequence
  Description of Artificial Sequence: targeting sequence/synthetic sequence
VQNALNGNGDPNNMDRAVKL

SEQ ID NO: 8789 - protein, 20 aa, Artificial Sequence
  Description of Artificial Sequence: targeting sequence/synthetic sequence
LAAAMPRSAPNDILDLRLPP

SEQ ID NO: 8790 - protein, 20 aa, Artificial Sequence
  Description of Artificial Sequence: targeting sequence/synthetic sequence
YQGDVQNAVEGAMVRVADTV

SEQ ID NO: 8791 - protein, 20 aa, Artificial Sequence
  Description of Artificial Sequence: targeting sequence/synthetic sequence
KVTGVPGTEFVQKLNDKAAK

SEQ ID NO: 8792 - protein, 20 aa, Artificial Sequence
  Description of Artificial Sequence: targeting sequence/synthetic sequence
LKTQRNTSINMQLPSRETNP

SEQ ID NO: 8793 - protein, 20 aa, Artificial Sequence
  Description of Artificial Sequence: targeting sequence/synthetic sequence
FYQNDVQNAVERSIVRVADT

SEQ ID NO: 8794 - protein, 20 aa, Artificial Sequence
  Description of Artificial Sequence: targeting sequence/synthetic sequence
VTKLKQLEMLENQISTIHQS

SEQ ID NO: 8795 - protein, 20 aa, Artificial Sequence
  Description of Artificial Sequence: targeting sequence/synthetic sequence
RHQQSAEFVNDLKRANSNLV

SEQ ID NO: 8796 - protein, 20 aa, Artificial Sequence
  Description of Artificial Sequence: targeting sequence/synthetic sequence
FNDIAAGIPSITAYSKNGLK

SEQ ID NO: 8797 - protein, 20 aa, Artificial Sequence
  Description of Artificial Sequence: targeting sequence/synthetic sequence
QPSLKTGSEELTSLYNTVAT

SEQ ID NO: 8798 - protein, 20 aa, Artificial Sequence
  Description of Artificial Sequence: targeting sequence/synthetic sequence
SNVLRNIENAVGSARDDVLI

SEQ ID NO: 8799 - protein, 20 aa, Artificial Sequence
  Description of Artificial Sequence: targeting sequence/synthetic sequence
SVLSGKKTDELEKVRLRPGG

SEQ ID NO: 8800 - protein, 20 aa, Artificial Sequence
  Description of Artificial Sequence: targeting sequence/synthetic sequence
HNAILRASLPKDRSPEEYGI

SEQ ID NO: 8801 - protein, 20 aa, Artificial Sequence
  Description of Artificial Sequence: targeting sequence/synthetic sequence
KSNGKETVVGRLNETHIFNG

SEQ ID NO: 8802 - protein, 20 aa, Artificial Sequence
  Description of Artificial Sequence: targeting sequence/synthetic sequence
SNDVTLANHMEAGGRAGRIH

SEQ ID NO: 8803 - protein, 20 aa, Artificial Sequence
  Description of Artificial Sequence: targeting sequence/synthetic sequence
SSKFQFSSNKEQNGVQDPQH

SEQ ID NO: 8804 - protein, 20 aa, Artificial Sequence
  Description of Artificial Sequence: targeting sequence/synthetic sequence
ANEVSQKIGDNLRELQQRLE

SEQ ID NO: 8805 - protein, 20 aa, Artificial Sequence
  Description of Artificial Sequence: targeting sequence/synthetic sequence
LRQLDMLDLSNNSLASVPEG

SEQ ID NO: 8806 - protein, 20 aa, Artificial Sequence
  Description of Artificial Sequence: targeting sequence/synthetic sequence
YRERHSEVVGGHHTSINDLL

SEQ ID NO: 8807 - protein, 20 aa, Artificial Sequence
  Description of Artificial Sequence: targeting sequence/synthetic sequence
HAAKAALAAFNAQNNGSNFQ

SEQ ID NO: 8808 - protein, 20 aa, Artificial Sequence
  Description of Artificial Sequence: targeting sequence/synthetic sequence
TQGKEHSEMSNNVSDPKGPP

SEQ ID NO: 8809 - protein, 20 aa, Artificial Sequence
  Description of Artificial Sequence: targeting sequence/synthetic sequence
PRKSNLDEEVNVIPPHTPVR

SEQ ID NO: 8810 - protein, 20 aa, Artificial Sequence
  Description of Artificial Sequence: targeting sequence/synthetic sequence
DGDPHSDYINANYIDGYHRP

SEQ ID NO: 8811 - protein, 20 aa, Artificial Sequence
  Description of Artificial Sequence: targeting sequence/synthetic sequence
EVLNEVLVVPNIKESHHTTS

SEQ ID NO: 8812 - protein, 20 aa, Artificial Sequence
  Description of Artificial Sequence: targeting sequence/synthetic sequence
VTRNALTPLTPVNNLPDTRS

SEQ ID NO: 8813 - protein, 20 aa, Artificial Sequence
  Description of Artificial Sequence: targeting sequence/synthetic sequence
VWSNDVTLANHMEAGGRAGR

SEQ ID NO: 8814 - protein, 20 aa, Artificial Sequence
  Description of Artificial Sequence: targeting sequence/synthetic sequence
SNLSSKFQFSSNKEQNGVQD

SEQ ID NO: 8815 - protein, 20 aa, Artificial Sequence
  Description of Artificial Sequence: targeting sequence/synthetic sequence
PSLSGSRNGEENIIDNPYLR

SEQ ID NO: 8816 - protein, 20 aa, Artificial Sequence
  Description of Artificial Sequence: targeting sequence/synthetic sequence
MHSQSTNQLDVGNNPRVGTK

SEQ ID NO: 8817 - protein, 20 aa, Artificial Sequence
  Description of Artificial Sequence: targeting sequence/synthetic sequence
TRNGSMKAADNFLDPNKASS

SEQ ID NO: 8818 - protein, 20 aa, Artificial Sequence
  Description of Artificial Sequence: targeting sequence/synthetic sequence
IKVSNTLESRLDLSAKQKMP

SEQ ID NO: 8819 - protein, 20 aa, Artificial Sequence
  Description of Artificial Sequence: targeting sequence/synthetic sequence
LQGIQLNTILPDARDPAFKA

SEQ ID NO: 8820 - protein, 20 aa, Artificial Sequence
  Description of Artificial Sequence: targeting sequence/synthetic sequence
ARPYSATAAAATGGMANVKA

SEQ ID NO: 8821 - protein, 20 aa, Artificial Sequence
  Description of Artificial Sequence: targeting sequence/synthetic sequence
LTCAVGDGGNDVSMIQESDC

SEQ ID NO: 8822 - protein, 20 aa, Artificial Sequence
  Description of Artificial Sequence: targeting sequence/synthetic sequence
VNANTVLDDLNSRMPQSRHD

SEQ ID NO: 8823 - protein, 20 aa, Artificial Sequence
  Description of Artificial Sequence: targeting sequence/synthetic sequence
LLGGNEIQRDPGYPRDLMPP

SEQ ID NO: 8824 - protein, 20 aa, Artificial Sequence
  Description of Artificial Sequence: targeting sequence/synthetic sequence
KIIMKVGQDPNAVTPEQLTT

SEQ ID NO: 8825 - protein, 20 aa, Artificial Sequence
  Description of Artificial Sequence: targeting sequence/synthetic sequence
PGLLGGNEIQRDPGYPRDLM

SEQ ID NO: 8826 - protein, 20 aa, Artificial Sequence
  Description of Artificial Sequence: targeting sequence/synthetic sequence
QHLNPAIESDNNFTDTTKIF

SEQ ID NO: 8827 - protein, 20 aa, Artificial Sequence
  Description of Artificial Sequence: targeting sequence/synthetic sequence
QRRRFVQNALNGNGDPNNMD

SEQ ID NO: 8828 - protein, 20 aa, Artificial Sequence
  Description of Artificial Sequence: targeting sequence/synthetic sequence
SGSGGHNTMPSGGNSVSSGS

SEQ ID NO: 8829 - protein, 20 aa, Artificial Sequence
  Description of Artificial Sequence: targeting sequence/synthetic sequence
QISDINDERLQQGVSLLRDH

SEQ ID NO: 8830 - protein, 20 aa, Artificial Sequence
  Description of Artificial Sequence: targeting sequence/synthetic sequence
SSNKEQNGVQDPQHERIITV

SEQ ID NO: 8831 - protein, 20 aa, Artificial Sequence
  Description of Artificial Sequence: targeting sequence/synthetic sequence
TIDTVISNALQLSQPKPQKQ

SEQ ID NO: 8832 - protein, 20 aa, Artificial Sequence
  Description of Artificial Sequence: targeting sequence/synthetic sequence
NGKSYSLKASSTMAKSENLV

SEQ ID NO: 8833 - protein, 20 aa, Artificial Sequence
  Description of Artificial Sequence: targeting sequence/synthetic sequence
VSIVADQLEKNRLPSVHPHH

SEQ ID NO: 8834 - protein, 20 aa, Artificial Sequence
  Description of Artificial Sequence: targeting sequence/synthetic sequence
AFYQNDVQNAVERSIVRVAD

SEQ ID NO: 8835 - protein, 20 aa, Artificial Sequence
  Description of Artificial Sequence: targeting sequence/synthetic sequence
IPEQLISNEMPFDALPKKKS

SEQ ID NO: 8836 - protein, 20 aa, Artificial Sequence
  Description of Artificial Sequence: targeting sequence/synthetic sequence
KSNLDEEVNVIPPHTPVRTV

SEQ ID NO: 8837 - protein, 20 aa, Artificial Sequence
  Description of Artificial Sequence: targeting sequence/synthetic sequence
FLPDEGKLQHLENELTHDII

SEQ ID NO: 8838 - protein, 20 aa, Artificial Sequence
  Description of Artificial Sequence: targeting sequence/synthetic sequence
TSQLKSVGLNLEGNGIATDV

SEQ ID NO: 8839 - protein, 20 aa, Artificial Sequence
  Description of Artificial Sequence: targeting sequence/synthetic sequence
EIRHQQSAEFVNDLKRANSN

SEQ ID NO: 8840 - protein, 20 aa, Artificial Sequence
  Description of Artificial Sequence: targeting sequence/synthetic sequence
KAVNNSLNVNFGAISEGKMQ

SEQ ID NO: 8841 - protein, 20 aa, Artificial Sequence
  Description of Artificial Sequence: targeting sequence/synthetic sequence
IYNSRLSEVNIAQNNDIIYN

SEQ ID NO: 8842 - protein, 20 aa, Artificial Sequence
  Description of Artificial Sequence: targeting sequence/synthetic sequence
PEKTKPPLPSVQKLVEDRWN

SEQ ID NO: 8843 - protein, 20 aa, Artificial Sequence
  Description of Artificial Sequence: targeting sequence/synthetic sequence
NNAILRANLQKGENPSHYGI

SEQ ID NO: 8844 - protein, 20 aa, Artificial Sequence
  Description of Artificial Sequence: targeting sequence/synthetic sequence
LPANLLQGASKLQELHLSSN

SEQ ID NO: 8845 - protein, 20 aa, Artificial Sequence
  Description of Artificial Sequence: targeting sequence/synthetic sequence
FYDTSEENYQALDADFRKLR

SEQ ID NO: 8846 - protein, 20 aa, Artificial Sequence
  Description of Artificial Sequence: targeting sequence/synthetic sequence
KENELPTTPVKKDSPKNITL

SEQ ID NO: 8847 - protein, 20 aa, Artificial Sequence
  Description of Artificial Sequence: targeting sequence/synthetic sequence
QLRSVGLNLEGNGVATDVPS

SEQ ID NO: 8848 - protein, 20 aa, Artificial Sequence
  Description of Artificial Sequence: targeting sequence/synthetic sequence
QPLRPSQLKQPNGVNSQEVP

SEQ ID NO: 8849 - protein, 20 aa, Artificial Sequence
  Description of Artificial Sequence: targeting sequence/synthetic sequence
ASKLQELHLSSNGLESLSPE

SEQ ID NO: 8850 - protein, 20 aa, Artificial Sequence
  Description of Artificial Sequence: targeting sequence/synthetic sequence
TLNTLVQDNSYVPRYDSNGT

SEQ ID NO: 8851 - protein, 20 aa, Artificial Sequence
  Description of Artificial Sequence: targeting sequence/synthetic sequence
TAKNLFLNHSENATAKDIAP

SEQ ID NO: 8852 - protein, 20 aa, Artificial Sequence
  Description of Artificial Sequence: targeting sequence/synthetic sequence
YLLGSRKVSGGGVTKESAEK

SEQ ID NO: 8853 - protein, 20 aa, Artificial Sequence
  Description of Artificial Sequence: targeting sequence/synthetic sequence
LSSKFQFSSNKEQNGVQDPQ

SEQ ID NO: 8854 - protein, 20 aa, Artificial Sequence
  Description of Artificial Sequence: targeting sequence/synthetic sequence
GVTLHDNNRLTEEKKVPINL

SEQ ID NO: 8855 - protein, 20 aa, Artificial Sequence
  Description of Artificial Sequence: targeting sequence/synthetic sequence
YTVLHRLGHPEPNHVTEASE

SEQ ID NO: 8856 - protein, 20 aa, Artificial Sequence
  Description of Artificial Sequence: targeting sequence/synthetic sequence
PALQTGTQEIKSLYNTVATL

SEQ ID NO: 8857 - protein, 20 aa, Artificial Sequence
  Description of Artificial Sequence: targeting sequence/synthetic sequence
KRYNGSDPASGPSVQDKYVT

SEQ ID NO: 8858 - protein, 20 aa, Artificial Sequence
  Description of Artificial Sequence: targeting sequence/synthetic sequence
KSQVENLKNSLDVKISEAMN

SEQ ID NO: 8859 - protein, 20 aa, Artificial Sequence
  Description of Artificial Sequence: targeting sequence/synthetic sequence
FGTRDRTCNVTSHGIDGCDL

SEQ ID NO: 8860 - protein, 20 aa, Artificial Sequence
  Description of Artificial Sequence: targeting sequence/synthetic sequence
SKNTLSLQMNSLRVEDTAVY

SEQ ID NO: 8861 - protein, 20 aa, Artificial Sequence
  Description of Artificial Sequence: targeting sequence/synthetic sequence
RNALTPLTPVNNLPDTRSSG

SEQ ID NO: 8862 - protein, 20 aa, Artificial Sequence
  Description of Artificial Sequence: targeting sequence/synthetic sequence
ADALTNAVAHVDDMPNALSA

SEQ ID NO: 8863 - protein, 20 aa, Artificial Sequence
  Description of Artificial Sequence: targeting sequence/synthetic sequence
EFRTVAANVIGIGEPSRPSE

SEQ ID NO: 8864 - protein, 20 aa, Artificial Sequence
  Description of Artificial Sequence: targeting sequence/synthetic sequence
GNDIQILRSSTNIAIEKLND

SEQ ID NO: 8865 - protein, 20 aa, Artificial Sequence
  Description of Artificial Sequence: targeting sequence/synthetic sequence
NVAHNAILRASLPKDRSPEE

SEQ ID NO: 8866 - protein, 20 aa, Artificial Sequence
  Description of Artificial Sequence: targeting sequence/synthetic sequence
KVSSSKPEENKIRQEDLTKI

SEQ ID NO: 8867 - protein, 20 aa, Artificial Sequence
  Description of Artificial Sequence: targeting sequence/synthetic sequence
IGKKGHASDLTSPDKIQTIM

SEQ ID NO: 8868 - protein, 20 aa, Artificial Sequence
  Description of Artificial Sequence: targeting sequence/synthetic sequence
SVDGESSNYINAALMDSHKQ

SEQ ID NO: 8869 - protein, 20 aa, Artificial Sequence
  Description of Artificial Sequence: targeting sequence/synthetic sequence
GESIVNANTVLDDLNSRMPQ

SEQ ID NO: 8870 - protein, 20 aa, Artificial Sequence
  Description of Artificial Sequence: targeting sequence/synthetic sequence
SAEFVNDLKRANSNLVAAYE

SEQ ID NO: 8871 - protein, 20 aa, Artificial Sequence
  Description of Artificial Sequence: targeting sequence/synthetic sequence
AVMHSQSTNQLDVGNNPRVG

SEQ ID NO: 8872 - protein, 20 aa, Artificial Sequence
  Description of Artificial Sequence: targeting sequence/synthetic sequence
KNYLLNNKIPSNNVEEAGSK

SEQ ID NO: 8873 - protein, 20 aa, Artificial Sequence
  Description of Artificial Sequence: targeting sequence/synthetic sequence
RSGQQIVGPPRKKSPNELVD

SEQ ID NO: 8874 - protein, 20 aa, Artificial Sequence
  Description of Artificial Sequence: targeting sequence/synthetic sequence
NSALEKRLQALETKQQEELA

SEQ ID NO: 8875 - protein, 20 aa, Artificial Sequence
  Description of Artificial Sequence: targeting sequence/synthetic sequence
SGVAVSKVLHLEGEVNKIKS

SEQ ID NO: 8876 - protein, 20 aa, Artificial Sequence
  Description of Artificial Sequence: targeting sequence/synthetic sequence
PAIESDNNFTDTTKIFHDSL

SEQ ID NO: 8877 - protein, 20 aa, Artificial Sequence
  Description of Artificial Sequence: targeting sequence/synthetic sequence
FSSNKEQNGVQDPQHERIIT

SEQ ID NO: 8878 - protein, 20 aa, Artificial Sequence
  Description of Artificial Sequence: targeting sequence/synthetic sequence
YIEESLNKITQNSGNDVRNF

SEQ ID NO: 8879 - protein, 20 aa, Artificial Sequence
  Description of Artificial Sequence: targeting sequence/synthetic sequence
TTQIGEIVKTVANTVESEIK

SEQ ID NO: 8880 - protein, 20 aa, Artificial Sequence
  Description of Artificial Sequence: targeting sequence/synthetic sequence
QLQPALQTGTQEIKSLYNTV

SEQ ID NO: 8881 - protein, 20 aa, Artificial Sequence
  Description of Artificial Sequence: targeting sequence/synthetic sequence
DFNKNTALDKNYLLNNKIPS

SEQ ID NO: 8882 - protein, 20 aa, Artificial Sequence
  Description of Artificial Sequence: targeting sequence/synthetic sequence
HSANVLHRDLKPSNLLLNTT

SEQ ID NO: 8883 - protein, 20 aa, Artificial Sequence
  Description of Artificial Sequence: targeting sequence/synthetic sequence
KVADALTNAVAHVDDMPNAL

SEQ ID NO: 8884 - protein, 20 aa, Artificial Sequence
  Description of Artificial Sequence: targeting sequence/synthetic sequence
IQLNTILPDARDPAFKAANG

SEQ ID NO: 8885 - protein, 20 aa, Artificial Sequence
  Description of Artificial Sequence: targeting sequence/synthetic sequence
GARGSVLSGKKTDELEKVRL

SEQ ID NO: 8886 - protein, 20 aa, Artificial Sequence
  Description of Artificial Sequence: targeting sequence/synthetic sequence
SNLDEEVNVIPPHTPVRTVM

SEQ ID NO: 8887 - protein, 20 aa, Artificial Sequence
  Description of Artificial Sequence: targeting sequence/synthetic sequence
KGAIELYNNNTHDLVGDVKL

SEQ ID NO: 8888 - protein, 20 aa, Artificial Sequence
  Description of Artificial Sequence: targeting sequence/synthetic sequence
GQMLESMIDNTVRETVGAAT

SEQ ID NO: 8889 - protein, 20 aa, Artificial Sequence
  Description of Artificial Sequence: targeting sequence/synthetic sequence
QAATTQIGEIVKTVANTVES

SEQ ID NO: 8890 - protein, 20 aa, Artificial Sequence
  Description of Artificial Sequence: targeting sequence/synthetic sequence
QLGFIHRDIKPDNLLLDSKG

SEQ ID NO: 8891 - protein, 20 aa, Artificial Sequence
  Description of Artificial Sequence: targeting sequence/synthetic sequence
LTPLTPVNNLPDTRSSGPAH

SEQ ID NO: 8892 - protein, 20 aa, Artificial Sequence
  Description of Artificial Sequence: targeting sequence/synthetic sequence
YAQDTQEKLNHQLEGLTFQM

SEQ ID NO: 8893 - protein, 20 aa, Artificial Sequence
  Description of Artificial Sequence: targeting sequence/synthetic sequence
NSNNHLAADSQAYDQKNIRR

SEQ ID NO: 8894 - protein, 20 aa, Artificial Sequence
  Description of Artificial Sequence: targeting sequence/synthetic sequence
PVIGSEVFLPNSNHVASGAG

SEQ ID NO: 8895 - protein, 20 aa, Artificial Sequence
  Description of Artificial Sequence: targeting sequence/synthetic sequence
LLIQGSNDVEIRAEGNSRFT

SEQ ID NO: 8896 - protein, 20 aa, Artificial Sequence
  Description of Artificial Sequence: targeting sequence/synthetic sequence
GLSSQPLFNDIAAGIPSITA

SEQ ID NO: 8897 - protein, 20 aa, Artificial Sequence
  Description of Artificial Sequence: targeting sequence/synthetic sequence
HINASNNSEPSRMNMTSLDA

SEQ ID NO: 8898 - protein, 20 aa, Artificial Sequence
  Description of Artificial Sequence: targeting sequence/synthetic sequence
YSLKASSTMAKSENLVKSHV

SEQ ID NO: 8899 - protein, 20 aa, Artificial Sequence
  Description of Artificial Sequence: targeting sequence/synthetic sequence
KIPQLTLNFSEVKTEKKNSS

SEQ ID NO: 8900 - protein, 20 aa, Artificial Sequence
  Description of Artificial Sequence: targeting sequence/synthetic sequence
RGRTLEIPGNSDPNMIPDGD

SEQ ID NO: 8901 - protein, 20 aa, Artificial Sequence
  Description of Artificial Sequence: targeting sequence/synthetic sequence
IRDIQDENQLLVADVKRLGK

SEQ ID NO: 8902 - protein, 20 aa, Artificial Sequence
  Description of Artificial Sequence: targeting sequence/synthetic sequence
AQNALALSLPKPQSNLPDTK

SEQ ID NO: 8903 - protein, 20 aa, Artificial Sequence
  Description of Artificial Sequence: targeting sequence/synthetic sequence
NNQIESIRSPEGSRKNPART

SEQ ID NO: 8904 - protein, 20 aa, Artificial Sequence
  Description of Artificial Sequence: targeting sequence/synthetic sequence
TNLKIRQGLSHTADMQTREV

SEQ ID NO: 8905 - protein, 20 aa, Artificial Sequence
  Description of Artificial Sequence: targeting sequence/synthetic sequence
KALHTATFQALQRDLELQAA

SEQ ID NO: 8906 - protein, 20 aa, Artificial Sequence
  Description of Artificial Sequence: targeting sequence/synthetic sequence
GETNLKIRQGLSHTADMQTR

SEQ ID NO: 8907 - protein, 20 aa, Artificial Sequence
  Description of Artificial Sequence: targeting sequence/synthetic sequence
RQRVLRGDADNDMVKIENLT

SEQ ID NO: 8908 - protein, 20 aa, Artificial Sequence
  Description of Artificial Sequence: targeting sequence/synthetic sequence
SSLSYNRNEVLASNGDKIES

SEQ ID NO: 8909 - protein, 20 aa, Artificial Sequence
  Description of Artificial Sequence: targeting sequence/synthetic sequence
ISNLSNTIEKINTLGLDSKN

SEQ ID NO: 8910 - protein, 20 aa, Artificial Sequence
  Description of Artificial Sequence: targeting sequence/synthetic sequence
PSNIENLQLTNSLNDALRNN

SEQ ID NO: 8911 - protein, 20 aa, Artificial Sequence
  Description of Artificial Sequence: targeting sequence/synthetic sequence
RDDSKNSVHLQMNSLKTDDT

SEQ ID NO: 8912 - protein, 20 aa, Artificial Sequence
  Description of Artificial Sequence: targeting sequence/synthetic sequence
TPLTPANNLPDTQSSGPAHS

SEQ ID NO: 8913 - protein, 20 aa, Artificial Sequence
  Description of Artificial Sequence: targeting sequence/synthetic sequence
KKENELPTTPVKKDSPKNIT

SEQ ID NO: 8914 - protein, 20 aa, Artificial Sequence
  Description of Artificial Sequence: targeting sequence/synthetic sequence
QTSQNIKNQLAELNATNIYT

SEQ ID NO: 8915 - protein, 20 aa, Artificial Sequence
  Description of Artificial Sequence: targeting sequence/synthetic sequence
QSPPLHEPANMTTDPSSYYH

SEQ ID NO: 8916 - protein, 20 aa, Artificial Sequence
  Description of Artificial Sequence: targeting sequence/synthetic sequence
LQPSLKTGSEEIRSLYNTVA

SEQ ID NO: 8917 - protein, 20 aa, Artificial Sequence
  Description of Artificial Sequence: targeting sequence/synthetic sequence
LERPGGNEITRGGSTSYGTG

SEQ ID NO: 8918 - protein, 20 aa, Artificial Sequence
  Description of Artificial Sequence: targeting sequence/synthetic sequence
YVDIASNIIGDLSSLPIAGK

SEQ ID NO: 8919 - protein, 20 aa, Artificial Sequence
  Description of Artificial Sequence: targeting sequence/synthetic sequence
MNDILAQVATNTETSKNVGN

SEQ ID NO: 8920 - protein, 20 aa, Artificial Sequence
  Description of Artificial Sequence: targeting sequence/synthetic sequence
GSGHYAAGLDLNDTYSGKRE

SEQ ID NO: 8921 - protein, 20 aa, Artificial Sequence
  Description of Artificial Sequence: targeting sequence/synthetic sequence
LDEEVNVIPPHTPVRTVMNT

SEQ ID NO: 8922 - protein, 20 aa, Artificial Sequence
  Description of Artificial Sequence: targeting sequence/synthetic sequence
PANLLQGASKLQELHLSSNG

SEQ ID NO: 8923 - protein, 20 aa, Artificial Sequence
  Description of Artificial Sequence: targeting sequence/synthetic sequence
LENRFNEIDRKLDSHSAALE

SEQ ID NO: 8924 - protein, 20 aa, Artificial Sequence
  Description of Artificial Sequence: targeting sequence/synthetic sequence
AKAALAAFNAQNNGSNFQLE

SEQ ID NO: 8925 - protein, 20 aa, Artificial Sequence
  Description of Artificial Sequence: targeting sequence/synthetic sequence
HTATFQALQRDLELQAASSR

SEQ ID NO: 8926 - protein, 20 aa, Artificial Sequence
  Description of Artificial Sequence: targeting sequence/synthetic sequence
PEGYNTVVGERGTTLSGGQK

SEQ ID NO: 8927 - protein, 20 aa, Artificial Sequence
  Description of Artificial Sequence: targeting sequence/synthetic sequence
LMASGSGGHNTMPSGGNSVS

SEQ ID NO: 8928 - protein, 20 aa, Artificial Sequence
  Description of Artificial Sequence: targeting sequence/synthetic sequence
KLHLQSTDYGNFLANEASPL

SEQ ID NO: 8929 - protein, 20 aa, Artificial Sequence
  Description of Artificial Sequence: targeting sequence/synthetic sequence
RSPVIGSEVFLPNSNHVASG

SEQ ID NO: 8930 - protein, 20 aa, Artificial Sequence
  Description of Artificial Sequence: targeting sequence/synthetic sequence
MNSLGLVTSNGLPEVENLSK

SEQ ID NO: 8931 - protein, 20 aa, Artificial Sequence
  Description of Artificial Sequence: targeting sequence/synthetic sequence
PYAQDTQEKLNHQLEGLTFQ

SEQ ID NO: 8932 - protein, 20 aa, Artificial Sequence
  Description of Artificial Sequence: targeting sequence/synthetic sequence
SGIAVSKVLHLEGEVNKIKS

SEQ ID NO: 8933 - protein, 20 aa, Artificial Sequence
  Description of Artificial Sequence: targeting sequence/synthetic sequence
HTLNQIDEVKVWPQQPSGEL

SEQ ID NO: 8934 - protein, 20 aa, Artificial Sequence
  Description of Artificial Sequence: targeting sequence/synthetic sequence
WDTAKEDENRNKNRYGNIIS

SEQ ID NO: 8935 - protein, 20 aa, Artificial Sequence
  Description of Artificial Sequence: targeting sequence/synthetic sequence
SKSANTITSFVDRGLDDLSH

SEQ ID NO: 8936 - protein, 20 aa, Artificial Sequence
  Description of Artificial Sequence: targeting sequence/synthetic sequence
YSGNQRIKVSNTLESRLDLS

SEQ ID NO: 8937 - protein, 20 aa, Artificial Sequence
  Description of Artificial Sequence: targeting sequence/synthetic sequence
LTTAKNLFLNHSENATAKDI

SEQ ID NO: 8938 - protein, 20 aa, Artificial Sequence
  Description of Artificial Sequence: targeting sequence/synthetic sequence
QPSIQTGSEEIKSLYNTIAV

SEQ ID NO: 8939 - protein, 20 aa, Artificial Sequence
  Description of Artificial Sequence: targeting sequence/synthetic sequence
HVDDMPNALSALSDLHAHKL

SEQ ID NO: 8940 - protein, 20 aa, Artificial Sequence
  Description of Artificial Sequence: targeting sequence/synthetic sequence
ERLHLEGNKLQVLGKDLLLP

SEQ ID NO: 8941 - protein, 20 aa, Artificial Sequence
  Description of Artificial Sequence: targeting sequence/synthetic sequence
IPGNSDPNMIPDGDFNSYVR

SEQ ID NO: 8942 - protein, 20 aa, Artificial Sequence
  Description of Artificial Sequence: targeting sequence/synthetic sequence
DIWGNTVNVSSRMDSTGVPD

SEQ ID NO: 8943 - protein, 20 aa, Artificial Sequence
  Description of Artificial Sequence: targeting sequence/synthetic sequence
TQKSKASQGSDLEQNEASRK

SEQ ID NO: 8944 - protein, 20 aa, Artificial Sequence
  Description of Artificial Sequence: targeting sequence/synthetic sequence
ELKAKIDQNVEELKGRLTPY

SEQ ID NO: 8945 - protein, 20 aa, Artificial Sequence
  Description of Artificial Sequence: targeting sequence/synthetic sequence
HLQIYPDGKVNGSHEANMLS

SEQ ID NO: 8946 - protein, 20 aa, Artificial Sequence
  Description of Artificial Sequence: targeting sequence/synthetic sequence
LNNLKQLPLLENQISNLEQS

SEQ ID NO: 8947 - protein, 20 aa, Artificial Sequence
  Description of Artificial Sequence: targeting sequence/synthetic sequence
KLFGRAPEVIARADNDVNSS

SEQ ID NO: 8948 - protein, 20 aa, Artificial Sequence
  Description of Artificial Sequence: targeting sequence/synthetic sequence
KQADTLNVIELNVQKTVDYT

SEQ ID NO: 8949 - protein, 20 aa, Artificial Sequence
  Description of Artificial Sequence: targeting sequence/synthetic sequence
ALQSNHFELSLRTEATQGLV

SEQ ID NO: 8950 - protein, 20 aa, Artificial Sequence
  Description of Artificial Sequence: targeting sequence/synthetic sequence
NALNGNGDPNNMDKAVKLYG

SEQ ID NO: 8951 - protein, 20 aa, Artificial Sequence
  Description of Artificial Sequence: targeting sequence/synthetic sequence
RNGVSEENLAKLIQHANVQA

SEQ ID NO: 8952 - protein, 20 aa, Artificial Sequence
  Description of Artificial Sequence: targeting sequence/synthetic sequence
GPLQDNELPGLDERPPRAHA

SEQ ID NO: 8953 - protein, 20 aa, Artificial Sequence
  Description of Artificial Sequence: targeting sequence/synthetic sequence
LQPSLKTGSEELTSLYNTVA

SEQ ID NO: 8954 - protein, 20 aa, Artificial Sequence
  Description of Artificial Sequence: targeting sequence/synthetic sequence
QTRANPMYNAVSNADLMDFK

SEQ ID NO: 8955 - protein, 20 aa, Artificial Sequence
  Description of Artificial Sequence: targeting sequence/synthetic sequence
QTVASISSGPKHTQKVPILT

SEQ ID NO: 8956 - protein, 20 aa, Artificial Sequence
  Description of Artificial Sequence: targeting sequence/synthetic sequence
GISSLSYNRNEVLASNGDKI

SEQ ID NO: 8957 - protein, 20 aa, Artificial Sequence
  Description of Artificial Sequence: targeting sequence/synthetic sequence
FYQGDVQNAVEGAMVRVADT

SEQ ID NO: 8958 - protein, 20 aa, Artificial Sequence
  Description of Artificial Sequence: targeting sequence/synthetic sequence
SSIPEQLISNEMPFDALPKK

SEQ ID NO: 8959 - protein, 20 aa, Artificial Sequence
  Description of Artificial Sequence: targeting sequence/synthetic sequence
INDISHTQSVSSKQKVTGLD

SEQ ID NO: 8960 - protein, 20 aa, Artificial Sequence
  Description of Artificial Sequence: targeting sequence/synthetic sequence
KSINQNNADIQVVNAISSLT

SEQ ID NO: 8961 - protein, 20 aa, Artificial Sequence
  Description of Artificial Sequence: targeting sequence/synthetic sequence
VWSNQLDGGAGVDTVKYNVH

SEQ ID NO: 8962 - protein, 20 aa, Artificial Sequence
  Description of Artificial Sequence: targeting sequence/synthetic sequence
STNNNQTQDPSRNELQVPRS

SEQ ID NO: 8963 - protein, 20 aa, Artificial Sequence
  Description of Artificial Sequence: targeting sequence/synthetic sequence
SVGLNLEGNGVATDVPTATK

SEQ ID NO: 8964 - protein, 20 aa, Artificial Sequence
  Description of Artificial Sequence: targeting sequence/synthetic sequence
SVLNEVLVVPNIQPSTSVSS

SEQ ID NO: 8965 - protein, 20 aa, Artificial Sequence
  Description of Artificial Sequence: targeting sequence/synthetic sequence
GGDAAEHNKVVTKDFDVIRN

SEQ ID NO: 8966 - protein, 20 aa, Artificial Sequence
  Description of Artificial Sequence: targeting sequence/synthetic sequence
NVSINKKIIQPGAEDQIKGL

SEQ ID NO: 8967 - protein, 20 aa, Artificial Sequence
  Description of Artificial Sequence: targeting sequence/synthetic sequence
AGIPSLVNNELVLRDKATKV

SEQ ID NO: 8968 - protein, 20 aa, Artificial Sequence
  Description of Artificial Sequence: targeting sequence/synthetic sequence
VGLNLEGNGVATDVPSATKR

SEQ ID NO: 8969 - protein, 20 aa, Artificial Sequence
  Description of Artificial Sequence: targeting sequence/synthetic sequence
SGTAVSKVLHLEGEVNKIKS

SEQ ID NO: 8970 - protein, 20 aa, Artificial Sequence
  Description of Artificial Sequence: targeting sequence/synthetic sequence
LQSTDYGNFLANEASPLTVS

SEQ ID NO: 8971 - protein, 20 aa, Artificial Sequence
  Description of Artificial Sequence: targeting sequence/synthetic sequence
RSSSRTPSDKPVAHVVANPQ

SEQ ID NO: 8972 - protein, 20 aa, Artificial Sequence
  Description of Artificial Sequence: targeting sequence/synthetic sequence
AVSKVLHLEGEVNKIKNALL

SEQ ID NO: 8973 - protein, 20 aa, Artificial Sequence
  Description of Artificial Sequence: targeting sequence/synthetic sequence
APGFRGPAGPNGIPGEKGPA

SEQ ID NO: 8974 - protein, 20 aa, Artificial Sequence
  Description of Artificial Sequence: targeting sequence/synthetic sequence
VQSKIGSLDNITHVPGGGNK

SEQ ID NO: 8975 - protein, 20 aa, Artificial Sequence
  Description of Artificial Sequence: targeting sequence/synthetic sequence
PRQLVTNCTQRLEQGPCKDL

SEQ ID NO: 8976 - protein, 20 aa, Artificial Sequence
  Description of Artificial Sequence: targeting sequence/synthetic sequence
GVAVSKVLHLEGEVNKIKSA

SEQ ID NO: 8977 - protein, 20 aa, Artificial Sequence
  Description of Artificial Sequence: targeting sequence/synthetic sequence
QNNADIQVVNAISSLTYPGA

SEQ ID NO: 8978 - protein, 20 aa, Artificial Sequence
  Description of Artificial Sequence: targeting sequence/synthetic sequence
EKTKQTLASVSSGPKHTQSV

SEQ ID NO: 8979 - protein, 20 aa, Artificial Sequence
  Description of Artificial Sequence: targeting sequence/synthetic sequence
SSSIPEQLISNEMPFDALPK

SEQ ID NO: 8980 - protein, 20 aa, Artificial Sequence
  Description of Artificial Sequence: targeting sequence/synthetic sequence
FGRAPEVIARADNDVNSSLA

SEQ ID NO: 8981 - protein, 20 aa, Artificial Sequence
  Description of Artificial Sequence: targeting sequence/synthetic sequence
LTGTAGKISSISQPGNDFST

SEQ ID NO: 8982 - protein, 20 aa, Artificial Sequence
  Description of Artificial Sequence: targeting sequence/synthetic sequence
LGSRKVSGGGVTKESAEKGF

SEQ ID NO: 8983 - protein, 20 aa, Artificial Sequence
  Description of Artificial Sequence: targeting sequence/synthetic sequence
NYLLNNKIPSNNVEEAGSKN

SEQ ID NO: 8984 - protein, 20 aa, Artificial Sequence
  Description of Artificial Sequence: targeting sequence/synthetic sequence
RDNSKNTLSLQMNSLRVEDT

SEQ ID NO: 8985 - protein, 20 aa, Artificial Sequence
  Description of Artificial Sequence: targeting sequence/synthetic sequence
EKQADTLNVIELNVQKTVDY

SEQ ID NO: 8986 - protein, 20 aa, Artificial Sequence
  Description of Artificial Sequence: targeting sequence/synthetic sequence
QINKSNGKETVVGRLNETHI

SEQ ID NO: 8987 - protein, 20 aa, Artificial Sequence
  Description of Artificial Sequence: targeting sequence/synthetic sequence
LGLVTSNGLPEVENLSKRYE

SEQ ID NO: 8988 - protein, 20 aa, Artificial Sequence
  Description of Artificial Sequence: targeting sequence/synthetic sequence
ENQVVSFLGHNGAGKTTTMS

SEQ ID NO: 8989 - protein, 20 aa, Artificial Sequence
  Description of Artificial Sequence: targeting sequence/synthetic sequence
TGGESRDLPSGQGINNLDNL

SEQ ID NO: 8990 - protein, 20 aa, Artificial Sequence
  Description of Artificial Sequence: targeting sequence/synthetic sequence
AILSSTNVGSNTYGKRNAVE

SEQ ID NO: 8991 - protein, 20 aa, Artificial Sequence
  Description of Artificial Sequence: targeting sequence/synthetic sequence
SQTIPQISNRTLNTLVQDNS

SEQ ID NO: 8992 - protein, 20 aa, Artificial Sequence
  Description of Artificial Sequence: targeting sequence/synthetic sequence
VPRQLVTNCTQRLEQGPCKD

SEQ ID NO: 8993 - protein, 20 aa, Artificial Sequence
  Description of Artificial Sequence: targeting sequence/synthetic sequence
DKEGNEVLTHKTWDGNYQDK

SEQ ID NO: 8994 - protein, 20 aa, Artificial Sequence
  Description of Artificial Sequence: targeting sequence/synthetic sequence
RANALLANGVELRDNQLVVP

SEQ ID NO: 8995 - protein, 20 aa, Artificial Sequence
  Description of Artificial Sequence: targeting sequence/synthetic sequence
LISVDGESSNYINAALMDSH

SEQ ID NO: 8996 - protein, 20 aa, Artificial Sequence
  Description of Artificial Sequence: targeting sequence/synthetic sequence
QIENELNQKVSIAMNNIDRF

SEQ ID NO: 8997 - protein, 20 aa, Artificial Sequence
  Description of Artificial Sequence: targeting sequence/synthetic sequence
SSEIRHQQSAEFVNDLKRAN

SEQ ID NO: 8998 - protein, 20 aa, Artificial Sequence
  Description of Artificial Sequence: targeting sequence/synthetic sequence
MQQSHQAGYANAADRESGIP

SEQ ID NO: 8999 - protein, 20 aa, Artificial Sequence
  Description of Artificial Sequence: targeting sequence/synthetic sequence
SGGVQQSVQDAFPNNVILSS

SEQ ID NO: 9000 - protein, 20 aa, Artificial Sequence
  Description of Artificial Sequence: targeting sequence/synthetic sequence
EAMNDILAQVATNTETSKNV

SEQ ID NO: 9001 - protein, 20 aa, Artificial Sequence
  Description of Artificial Sequence: targeting sequence/synthetic sequence
LQSPPIREAANYTENTSSYY

SEQ ID NO: 9002 - protein, 20 aa, Artificial Sequence
  Description of Artificial Sequence: targeting sequence/synthetic sequence
ISLSDNDTFAASEHGKRQNY

SEQ ID NO: 9003 - protein, 20 aa, Artificial Sequence
  Description of Artificial Sequence: targeting sequence/synthetic sequence
IKVKNNRLPYVADKDSISQE

SEQ ID NO: 9004 - protein, 20 aa, Artificial Sequence
  Description of Artificial Sequence: targeting sequence/synthetic sequence
TSQNIKNQLAELNATNIYTV

SEQ ID NO: 9005 - protein, 20 aa, Artificial Sequence
  Description of Artificial Sequence: targeting sequence/synthetic sequence
FGESIVNANTVLDDLNSRMP

SEQ ID NO: 9006 - protein, 20 aa, Artificial Sequence
  Description of Artificial Sequence: targeting sequence/synthetic sequence
LTKLKQLDMLENQIATIHQS

SEQ ID NO: 9007 - protein, 20 aa, Artificial Sequence
  Description of Artificial Sequence: targeting sequence/synthetic sequence
RGIQAYNEIENVLKSKQIAP

SEQ ID NO: 9008 - protein, 20 aa, Artificial Sequence
  Description of Artificial Sequence: targeting sequence/synthetic sequence
SQPLRPSQLKQPNGVNSQEV

SEQ ID NO: 9009 - protein, 20 aa, Artificial Sequence
  Description of Artificial Sequence: targeting sequence/synthetic sequence
FRGPAGPNGIPGEKGPAGER

SEQ ID NO: 9010 - protein, 20 aa, Artificial Sequence
  Description of Artificial Sequence: targeting sequence/synthetic sequence
TAAVAIVKANANAAAINNLA

SEQ ID NO: 9011 - protein, 20 aa, Artificial Sequence
  Description of Artificial Sequence: targeting sequence/synthetic sequence
IEQTSFYQGDVQNAVEGAMV

SEQ ID NO: 9012 - protein, 20 aa, Artificial Sequence
  Description of Artificial Sequence: targeting sequence/synthetic sequence
VGYLDRNLEKNSTKQEILAA

SEQ ID NO: 9013 - protein, 20 aa, Artificial Sequence
  Description of Artificial Sequence: targeting sequence/synthetic sequence
WGNTVNVSSRMDSTGVPDRI

SEQ ID NO: 9014 - protein, 20 aa, Artificial Sequence
  Description of Artificial Sequence: targeting sequence/synthetic sequence
WNQVDQVIRNALASPGSGGD

SEQ ID NO: 9015 - protein, 20 aa, Artificial Sequence
  Description of Artificial Sequence: targeting sequence/synthetic sequence
FGDNRKNQLKDMAIATGGAV

SEQ ID NO: 9016 - protein, 20 aa, Artificial Sequence
  Description of Artificial Sequence: targeting sequence/synthetic sequence
THTNISESHPNATFSAVGEA

SEQ ID NO: 9017 - protein, 20 aa, Artificial Sequence
  Description of Artificial Sequence: targeting sequence/synthetic sequence
VRFGSDDEGRYLTQETNKVE

SEQ ID NO: 9018 - protein, 20 aa, Artificial Sequence
  Description of Artificial Sequence: targeting sequence/synthetic sequence
ALTNAVAHVDDMPNALSALS

SEQ ID NO: 9019 - protein, 20 aa, Artificial Sequence
  Description of Artificial Sequence: targeting sequence/synthetic sequence
DNDVNSSLAHGHTAVDLTLS

SEQ ID NO: 9020 - protein, 20 aa, Artificial Sequence
  Description of Artificial Sequence: targeting sequence/synthetic sequence
PNAVTLRSVNNQPVIVDSLT

SEQ ID NO: 9021 - protein, 20 aa, Artificial Sequence
  Description of Artificial Sequence: targeting sequence/synthetic sequence
QNALNGNGDPNNMDKAIKLY

SEQ ID NO: 9022 - protein, 20 aa, Artificial Sequence
  Description of Artificial Sequence: targeting sequence/synthetic sequence
QFGIYNDKLSEVNISQNDYI

SEQ ID NO: 9023 - protein, 20 aa, Artificial Sequence
  Description of Artificial Sequence: targeting sequence/synthetic sequence
VSWNTVEDSIIRTGFQGESG

SEQ ID NO: 9024 - protein, 20 aa, Artificial Sequence
  Description of Artificial Sequence: targeting sequence/synthetic sequence
MIDNTVRETVGAATSRDALP

SEQ ID NO: 9025 - protein, 20 aa, Artificial Sequence
  Description of Artificial Sequence: targeting sequence/synthetic sequence
PALQTGTKELISLHNTVATL

SEQ ID NO: 9026 - protein, 20 aa, Artificial Sequence
  Description of Artificial Sequence: targeting sequence/synthetic sequence
KEVHALKRLRDSANANDVET

SEQ ID NO: 9027 - protein, 20 aa, Artificial Sequence
  Description of Artificial Sequence: targeting sequence/synthetic sequence
LPNKSGKKGNSADLTFPEKI

SEQ ID NO: 9028 - protein, 20 aa, Artificial Sequence
  Description of Artificial Sequence: targeting sequence/synthetic sequence
PLSGKVRSEGTNSTLTLSPV

SEQ ID NO: 9029 - protein, 20 aa, Artificial Sequence
  Description of Artificial Sequence: targeting sequence/synthetic sequence
MYGGVTLHDNNRLTEEKKVP

SEQ ID NO: 9030 - protein, 20 aa, Artificial Sequence
  Description of Artificial Sequence: targeting sequence/synthetic sequence
RVLRGDADNDMVKIENLTKV

SEQ ID NO: 9031 - protein, 20 aa, Artificial Sequence
  Description of Artificial Sequence: targeting sequence/synthetic sequence
QQIVGPPRKKSPNELVDDLF

SEQ ID NO: 9032 - protein, 20 aa, Artificial Sequence
  Description of Artificial Sequence: targeting sequence/synthetic sequence
VKGHGKKVADALTNAVAHVD

SEQ ID NO: 9033 - protein, 20 aa, Artificial Sequence
  Description of Artificial Sequence: targeting sequence/synthetic sequence
LGLKSLVSKGTLVQTKGTGA

SEQ ID NO: 9034 - protein, 20 aa, Artificial Sequence
  Description of Artificial Sequence: targeting sequence/synthetic sequence
DAMQHLDRQAAALTRNGGTF

SEQ ID NO: 9035 - protein, 20 aa, Artificial Sequence
  Description of Artificial Sequence: targeting sequence/synthetic sequence
TQAKFVSNQTELDREVLVGK

SEQ ID NO: 9036 - protein, 20 aa, Artificial Sequence
  Description of Artificial Sequence: targeting sequence/synthetic sequence
ITNLMTGQTANATSLLGTMT

SEQ ID NO: 9037 - protein, 20 aa, Artificial Sequence
  Description of Artificial Sequence: targeting sequence/synthetic sequence
IGNDIQILRSSTNIAIEKLN

SEQ ID NO: 9038 - protein, 20 aa, Artificial Sequence
  Description of Artificial Sequence: targeting sequence/synthetic sequence
QSAEFVNDLKRANSNLVAAY

SEQ ID NO: 9039 - protein, 20 aa, Artificial Sequence
  Description of Artificial Sequence: targeting sequence/synthetic sequence
FYRQVNQISGAHNTSDKQTP

SEQ ID NO: 9040 - protein, 20 aa, Artificial Sequence
  Description of Artificial Sequence: targeting sequence/synthetic sequence
ALVKANENAAAILNLKNAIQ

SEQ ID NO: 9041 - protein, 20 aa, Artificial Sequence
  Description of Artificial Sequence: targeting sequence/synthetic sequence
RESLLDGGNKVVISGFGDPL

SEQ ID NO: 9042 - protein, 20 aa, Artificial Sequence
  Description of Artificial Sequence: targeting sequence/synthetic sequence
WNTVEDSIIRTGFQGESGHD

SEQ ID NO: 9043 - protein, 20 aa, Artificial Sequence
  Description of Artificial Sequence: targeting sequence/synthetic sequence
TSEENYQALDADFRKLRQQD

SEQ ID NO: 9044 - protein, 20 aa, Artificial Sequence
  Description of Artificial Sequence: targeting sequence/synthetic sequence
SIDSGISSLSYNRNEVLASN

SEQ ID NO: 9045 - protein, 20 aa, Artificial Sequence
  Description of Artificial Sequence: targeting sequence/synthetic sequence
QKEWDKVVNTPNSLEKQKGV

SEQ ID NO: 9046 - protein, 20 aa, Artificial Sequence
  Description of Artificial Sequence: targeting sequence/synthetic sequence
LLPNKSGKKGNSADLTSPEK

SEQ ID NO: 9047 - protein, 20 aa, Artificial Sequence
  Description of Artificial Sequence: targeting sequence/synthetic sequence
CVAKEATEAAKCNLLAEKQY

SEQ ID NO: 9048 - protein, 20 aa, Artificial Sequence
  Description of Artificial Sequence: targeting sequence/synthetic sequence
EDSQSEDRNDLKASPTLGKR

SEQ ID NO: 9049 - protein, 20 aa, Artificial Sequence
  Description of Artificial Sequence: targeting sequence/synthetic sequence
GARSSVLSGKKTDELEKVRL

SEQ ID NO: 9050 - protein, 20 aa, Artificial Sequence
  Description of Artificial Sequence: targeting sequence/synthetic sequence
GTQLNAVNNSLTPQSTKVPS

SEQ ID NO: 9051 - protein, 20 aa, Artificial Sequence
  Description of Artificial Sequence: targeting sequence/synthetic sequence
FSAALKGTDVKTNGKYSDIL

SEQ ID NO: 9052 - protein, 20 aa, Artificial Sequence
  Description of Artificial Sequence: targeting sequence/synthetic sequence
ASGVAVSKVLHLEGEVNKIK

SEQ ID NO: 9053 - protein, 20 aa, Artificial Sequence
  Description of Artificial Sequence: targeting sequence/synthetic sequence
NAQNNGSNFQLEEISRAQLV

SEQ ID NO: 9054 - protein, 20 aa, Artificial Sequence
  Description of Artificial Sequence: targeting sequence/synthetic sequence
RRAAQATGPLQDNELPGLDE

SEQ ID NO: 9055 - protein, 20 aa, Artificial Sequence
  Description of Artificial Sequence: targeting sequence/synthetic sequence
ISDINDERLQQGVSLLRDHV

SEQ ID NO: 9056 - protein, 20 aa, Artificial Sequence
  Description of Artificial Sequence: targeting sequence/synthetic sequence
HVEELGVAGNIVRHIPDRGA

SEQ ID NO: 9057 - protein, 20 aa, Artificial Sequence
  Description of Artificial Sequence: targeting sequence/synthetic sequence
PEVIARADNDVNSSLAHGHT

SEQ ID NO: 9058 - protein, 20 aa, Artificial Sequence
  Description of Artificial Sequence: targeting sequence/synthetic sequence
PLKQRVEASISKANSFLGEK

SEQ ID NO: 9059 - protein, 20 aa, Artificial Sequence
  Description of Artificial Sequence: targeting sequence/synthetic sequence
VAGNIVRHIPDRGAPTRASE

SEQ ID NO: 9060 - protein, 20 aa, Artificial Sequence
  Description of Artificial Sequence: targeting sequence/synthetic sequence
IVAAIQAEKNRAGSSRQSIQ

SEQ ID NO: 9061 - protein, 20 aa, Artificial Sequence
  Description of Artificial Sequence: targeting sequence/synthetic sequence
DNELPGLDERPPRAHAQHFH

SEQ ID NO: 9062 - protein, 20 aa, Artificial Sequence
  Description of Artificial Sequence: targeting sequence/synthetic sequence
DEVLNEVLVVPNIKESHHTT

SEQ ID NO: 9063 - protein, 20 aa, Artificial Sequence
  Description of Artificial Sequence: targeting sequence/synthetic sequence
IAVSKVLHLEGEVNKIKSAL

SEQ ID NO: 9064 - protein, 20 aa, Artificial Sequence
  Description of Artificial Sequence: targeting sequence/synthetic sequence
LGVWSNQLDGGAGVDTVKYN

SEQ ID NO: 9065 - protein, 20 aa, Artificial Sequence
  Description of Artificial Sequence: targeting sequence/synthetic sequence
SDNELQEMSNQGSKYVNKEI

SEQ ID NO: 9066 - protein, 20 aa, Artificial Sequence
  Description of Artificial Sequence: targeting sequence/synthetic sequence
LNLEGNGVATDVPTATKRWG

SEQ ID NO: 9067 - protein, 20 aa, Artificial Sequence
  Description of Artificial Sequence: targeting sequence/synthetic sequence
EHSEMSNNVSDPKGPPAKIA

SEQ ID NO: 9068 - protein, 20 aa, Artificial Sequence
  Description of Artificial Sequence: targeting sequence/synthetic sequence
GVAGNIVRHIPDRGAPTRAS

SEQ ID NO: 9069 - protein, 20 aa, Artificial Sequence
  Description of Artificial Sequence: targeting sequence/synthetic sequence
QTSFYQGDVQNAVEGAMVRV

SEQ ID NO: 9070 - protein, 20 aa, Artificial Sequence
  Description of Artificial Sequence: targeting sequence/synthetic sequence
VGPPRKKSPNELVDDLFKGA

SEQ ID NO: 9071 - protein, 20 aa, Artificial Sequence
  Description of Artificial Sequence: targeting sequence/synthetic sequence
TISKTKGQPREPQVYTLPPS

SEQ ID NO: 9072 - protein, 20 aa, Artificial Sequence
  Description of Artificial Sequence: targeting sequence/synthetic sequence
LDIAFKLNNQIRENAEVSMD

SEQ ID NO: 9073 - protein, 20 aa, Artificial Sequence
  Description of Artificial Sequence: targeting sequence/synthetic sequence
IKPPLPSVTKLTEDRWNKPQ

SEQ ID NO: 9074 - protein, 20 aa, Artificial Sequence
  Description of Artificial Sequence: targeting sequence/synthetic sequence
LQKHLAELNHQKQLESNKIP

SEQ ID NO: 9075 - protein, 20 aa, Artificial Sequence
  Description of Artificial Sequence: targeting sequence/synthetic sequence
IQGSNDVEIRAEGNSRFTYT

SEQ ID NO: 9076 - protein, 20 aa, Artificial Sequence
  Description of Artificial Sequence: targeting sequence/synthetic sequence
LANKLSFNFSDKQDVPVSEI

SEQ ID NO: 9077 - protein, 20 aa, Artificial Sequence
  Description of Artificial Sequence: targeting sequence/synthetic sequence
FGGDISISNGLSGGLNGNTA

SEQ ID NO: 9078 - protein, 20 aa, Artificial Sequence
  Description of Artificial Sequence: targeting sequence/synthetic sequence
EKDGDNIIYQASSPDEAALV

SEQ ID NO: 9079 - protein, 20 aa, Artificial Sequence
  Description of Artificial Sequence: targeting sequence/synthetic sequence
LKGENSIKVDDPTYGKVSGA

SEQ ID NO: 9080 - protein, 20 aa, Artificial Sequence
  Description of Artificial Sequence: targeting sequence/synthetic sequence
EKDKTRADSVANKLGSFSKT

SEQ ID NO: 9081 - protein, 20 aa, Artificial Sequence
  Description of Artificial Sequence: targeting sequence/synthetic sequence
SKSTTDNDIALLHLAQPATL

SEQ ID NO: 9082 - protein, 20 aa, Artificial Sequence
  Description of Artificial Sequence: targeting sequence/synthetic sequence
TNHAIVQTLVNSVNSSIPKA

SEQ ID NO: 9083 - protein, 20 aa, Artificial Sequence
  Description of Artificial Sequence: targeting sequence/synthetic sequence
DIAFKLNNQIRENAEVSMDV

SEQ ID NO: 9084 - protein, 20 aa, Artificial Sequence
  Description of Artificial Sequence: targeting sequence/synthetic sequence
RAAQATGPLQDNELPGLDER

SEQ ID NO: 9085 - protein, 20 aa, Artificial Sequence
  Description of Artificial Sequence: targeting sequence/synthetic sequence
NLDEEVNVIPPHTPVRTVMN

SEQ ID NO: 9086 - protein, 20 aa, Artificial Sequence
  Description of Artificial Sequence: targeting sequence/synthetic sequence
LWLDGKQNTVPLETVKTNKK

SEQ ID NO: 9087 - protein, 20 aa, Artificial Sequence
  Description of Artificial Sequence: targeting sequence/synthetic sequence
KALQSNHFELSLRTEATQGL

SEQ ID NO: 9088 - protein, 20 aa, Artificial Sequence
  Description of Artificial Sequence: targeting sequence/synthetic sequence
FDFNFDQQTSQNIKNQLAEL

SEQ ID NO: 9089 - protein, 20 aa, Artificial Sequence
  Description of Artificial Sequence: targeting sequence/synthetic sequence
NSNSVSFNLLEQDPSGATTK

SEQ ID NO: 9090 - protein, 20 aa, Artificial Sequence
  Description of Artificial Sequence: targeting sequence/synthetic sequence
VIVEKTKQTVASISSGPKHT

SEQ ID NO: 9091 - protein, 20 aa, Artificial Sequence
  Description of Artificial Sequence: targeting sequence/synthetic sequence
NNQTQDPSRNELQVPRSFVD

SEQ ID NO: 9092 - protein, 20 aa, Artificial Sequence
  Description of Artificial Sequence: targeting sequence/synthetic sequence
TRNNMIQTKPTGTQQSTNTA

SEQ ID NO: 9093 - protein, 20 aa, Artificial Sequence
  Description of Artificial Sequence: targeting sequence/synthetic sequence
TQIGEIVKTVANTVESEIKA

SEQ ID NO: 9094 - protein, 20 aa, Artificial Sequence
  Description of Artificial Sequence: targeting sequence/synthetic sequence
KAPVDLLGVAHNNLMAMAQE

SEQ ID NO: 9095 - protein, 20 aa, Artificial Sequence
  Description of Artificial Sequence: targeting sequence/synthetic sequence
VVKKADMINKNMTHQVQAER

SEQ ID NO: 9096 - protein, 20 aa, Artificial Sequence
  Description of Artificial Sequence: targeting sequence/synthetic sequence
VDTGIGMTKADLINNLGTIA

SEQ ID NO: 9097 - protein, 20 aa, Artificial Sequence
  Description of Artificial Sequence: targeting sequence/synthetic sequence
ALNGNGDSNNMDRAVKLYRK

SEQ ID NO: 9098 - protein, 20 aa, Artificial Sequence
  Description of Artificial Sequence: targeting sequence/synthetic sequence
QRRRFVQNALNGNGDSNNMD

SEQ ID NO: 9099 - protein, 20 aa, Artificial Sequence
  Description of Artificial Sequence: targeting sequence/synthetic sequence
TLTKAPVDLLGVAHNNLMAM

SEQ ID NO: 9100 - protein, 20 aa, Artificial Sequence
  Description of Artificial Sequence: targeting sequence/synthetic sequence
AKSEREAQFVLRNEIQRDSA

SEQ ID NO: 9101 - protein, 20 aa, Artificial Sequence
  Description of Artificial Sequence: targeting sequence/synthetic sequence
GLKTQRNTSINMQLPSRETN

SEQ ID NO: 9102 - protein, 20 aa, Artificial Sequence
  Description of Artificial Sequence: targeting sequence/synthetic sequence
QILAKIPSENNKLTYSHGNY

SEQ ID NO: 9103 - protein, 20 aa, Artificial Sequence
  Description of Artificial Sequence: targeting sequence/synthetic sequence
GSTSDSNLNKYSTINKIPQL

SEQ ID NO: 9104 - protein, 20 aa, Artificial Sequence
  Description of Artificial Sequence: targeting sequence/synthetic sequence
LAMNLHNNEAGRQAVAKLMS

SEQ ID NO: 9105 - protein, 20 aa, Artificial Sequence
  Description of Artificial Sequence: targeting sequence/synthetic sequence
LLRDTTHISQEVMPQGLGDL

SEQ ID NO: 9106 - protein, 20 aa, Artificial Sequence
  Description of Artificial Sequence: targeting sequence/synthetic sequence
GFRGPAGPNGIPGEKGPAGE

SEQ ID NO: 9107 - protein, 20 aa, Artificial Sequence
  Description of Artificial Sequence: targeting sequence/synthetic sequence
SKASMGETAPRTNFNNAAIN

SEQ ID NO: 9108 - protein, 20 aa, Artificial Sequence
  Description of Artificial Sequence: targeting sequence/synthetic sequence
ALLLQGSNEIEIRAEGNSRF

SEQ ID NO: 9109 - protein, 20 aa, Artificial Sequence
  Description of Artificial Sequence: targeting sequence/synthetic sequence
VVEGVTRNALTPLTPVNNLP

SEQ ID NO: 9110 - protein, 20 aa, Artificial Sequence
  Description of Artificial Sequence: targeting sequence/synthetic sequence
HLNEATQGKEHSEMSNNVSD

SEQ ID NO: 9111 - protein, 20 aa, Artificial Sequence
  Description of Artificial Sequence: targeting sequence/synthetic sequence
LQDLGVWSNQLDGGAGVDTV

SEQ ID NO: 9112 - protein, 20 aa, Artificial Sequence
  Description of Artificial Sequence: targeting sequence/synthetic sequence
HPTPISTEANRVEAHGEATA

SEQ ID NO: 9113 - protein, 20 aa, Artificial Sequence
  Description of Artificial Sequence: targeting sequence/synthetic sequence
LDRNLEKNSTKQEILAALEK

SEQ ID NO: 9114 - protein, 20 aa, Artificial Sequence
  Description of Artificial Sequence: targeting sequence/synthetic sequence
RQLVTNCTQRLEQGPCKDLF

SEQ ID NO: 9115 - protein, 20 aa, Artificial Sequence
  Description of Artificial Sequence: targeting sequence/synthetic sequence
LGKNQTLATIKAKENQLSQI

SEQ ID NO: 9116 - protein, 20 aa, Artificial Sequence
  Description of Artificial Sequence: targeting sequence/synthetic sequence
RKLQATVQELQKRLDRLEET

SEQ ID NO: 9117 - protein, 20 aa, Artificial Sequence
  Description of Artificial Sequence: targeting sequence/synthetic sequence
PHDRATPQLPAQLQELEHRV

SEQ ID NO: 9118 - protein, 20 aa, Artificial Sequence
  Description of Artificial Sequence: targeting sequence/synthetic sequence
PASRANTVRSFHHEEHLENI

SEQ ID NO: 9119 - protein, 20 aa, Artificial Sequence
  Description of Artificial Sequence: targeting sequence/synthetic sequence
LKSVGLNLEGNGIATDVPSA

SEQ ID NO: 9120 - protein, 20 aa, Artificial Sequence
  Description of Artificial Sequence: targeting sequence/synthetic sequence
GVTRNALTPLTPVNNLPDTR

SEQ ID NO: 9121 - protein, 20 aa, Artificial Sequence
  Description of Artificial Sequence: targeting sequence/synthetic sequence
LIKARARELSSGQKDQGQAA

SEQ ID NO: 9122 - protein, 20 aa, Artificial Sequence
  Description of Artificial Sequence: targeting sequence/synthetic sequence
GLRQLDMLDLSNNSLASVPE

SEQ ID NO: 9123 - protein, 20 aa, Artificial Sequence
  Description of Artificial Sequence: targeting sequence/synthetic sequence
DATLKSLNNQIESIRSPEGS

SEQ ID NO: 9124 - protein, 20 aa, Artificial Sequence
  Description of Artificial Sequence: targeting sequence/synthetic sequence
RQGMGDMAVSNSIGSNVFDI

SEQ ID NO: 9125 - protein, 20 aa, Artificial Sequence
  Description of Artificial Sequence: targeting sequence/synthetic sequence
NNRDNTYNRVSEDLRSRIEV

SEQ ID NO: 9126 - protein, 20 aa, Artificial Sequence
  Description of Artificial Sequence: targeting sequence/synthetic sequence
KLLDNTIYTQNEGFNIASKN

SEQ ID NO: 9127 - protein, 20 aa, Artificial Sequence
  Description of Artificial Sequence: targeting sequence/synthetic sequence
INKKIIQPGAEDQIKGLMTN

SEQ ID NO: 9128 - protein, 20 aa, Artificial Sequence
  Description of Artificial Sequence: targeting sequence/synthetic sequence
ISNRVGVSIRTGTAFQPDPA

SEQ ID NO: 9129 - protein, 20 aa, Artificial Sequence
  Description of Artificial Sequence: targeting sequence/synthetic sequence
YNSRLSEVNIAQNNDIIYNS

SEQ ID NO: 9130 - protein, 20 aa, Artificial Sequence
  Description of Artificial Sequence: targeting sequence/synthetic sequence
AVENAVARVADTIGSGPSNS

SEQ ID NO: 9131 - protein, 20 aa, Artificial Sequence
  Description of Artificial Sequence: targeting sequence/synthetic sequence
LHRLGHPEPNHVTEASELLR

SEQ ID NO: 9132 - protein, 20 aa, Artificial Sequence
  Description of Artificial Sequence: targeting sequence/synthetic sequence
LPETANSVTLSDLQPGVQYN

SEQ ID NO: 9133 - protein, 20 aa, Artificial Sequence
  Description of Artificial Sequence: targeting sequence/synthetic sequence
LIAPKKTKPPVPSVQKLVED

SEQ ID NO: 9134 - protein, 20 aa, Artificial Sequence
  Description of Artificial Sequence: targeting sequence/synthetic sequence
KSGKKGNSADLTSPEKIQAI

SEQ ID NO: 9135 - protein, 20 aa, Artificial Sequence
  Description of Artificial Sequence: targeting sequence/synthetic sequence
LKGKDLVARESLLDGGNKVV

SEQ ID NO: 9136 - protein, 20 aa, Artificial Sequence
  Description of Artificial Sequence: targeting sequence/synthetic sequence
SWDTAKEDENRNKNRYGNII

SEQ ID NO: 9137 - protein, 20 aa, Artificial Sequence
  Description of Artificial Sequence: targeting sequence/synthetic sequence
EYFAPANTDANNIEGQAIRY

SEQ ID NO: 9138 - protein, 20 aa, Artificial Sequence
  Description of Artificial Sequence: targeting sequence/synthetic sequence
QKSKASQGSDLEQNEASRKN

SEQ ID NO: 9139 - protein, 20 aa, Artificial Sequence
  Description of Artificial Sequence: targeting sequence/synthetic sequence
LRSVGLNLEGNGVATDVPSA

SEQ ID NO: 9140 - protein, 20 aa, Artificial Sequence
  Description of Artificial Sequence: targeting sequence/synthetic sequence
QNPSLSGSRNGEENIIDNPY

SEQ ID NO: 9141 - protein, 20 aa, Artificial Sequence
  Description of Artificial Sequence: targeting sequence/synthetic sequence
QRRTSMGGTQQQFVEGVRME

SEQ ID NO: 9142 - protein, 20 aa, Artificial Sequence
  Description of Artificial Sequence: targeting sequence/synthetic sequence
GDAAEHNKVVTKDFDVIRNV

SEQ ID NO: 9143 - protein, 20 aa, Artificial Sequence
  Description of Artificial Sequence: targeting sequence/synthetic sequence
LDHRGRTLEIPGNSDPNMIP

SEQ ID NO: 9144 - protein, 20 aa, Artificial Sequence
  Description of Artificial Sequence: targeting sequence/synthetic sequence
IAVSKVLHLEGEVNKIKNAL

SEQ ID NO: 9145 - protein, 20 aa, Artificial Sequence
  Description of Artificial Sequence: targeting sequence/synthetic sequence
QISDINDENLQQGIYLLRDH

SEQ ID NO: 9146 - protein, 20 aa, Artificial Sequence
  Description of Artificial Sequence: targeting sequence/synthetic sequence
LSLDTSKNQFSLRLNSVTAA

SEQ ID NO: 9147 - protein, 20 aa, Artificial Sequence
  Description of Artificial Sequence: targeting sequence/synthetic sequence
FSSANNRDNTYNRVSEDLRS

SEQ ID NO: 9148 - protein, 20 aa, Artificial Sequence
  Description of Artificial Sequence: targeting sequence/synthetic sequence
RIHNSNILDERQGLMHELME

SEQ ID NO: 9149 - protein, 20 aa, Artificial Sequence
  Description of Artificial Sequence: targeting sequence/synthetic sequence
GALEIYKNNTHDLVGDVRLA

SEQ ID NO: 9150 - protein, 20 aa, Artificial Sequence
  Description of Artificial Sequence: targeting sequence/synthetic sequence
ETSNVLRNIENAVGSARDDV

SEQ ID NO: 9151 - protein, 20 aa, Artificial Sequence
  Description of Artificial Sequence: targeting sequence/synthetic sequence
LVLGKNQTLATIKAKENQLS

SEQ ID NO: 9152 - protein, 20 aa, Artificial Sequence
  Description of Artificial Sequence: targeting sequence/synthetic sequence
TYRERHSEVVGGHHTSINDL

SEQ ID NO: 9153 - protein, 20 aa, Artificial Sequence
  Description of Artificial Sequence: targeting sequence/synthetic sequence
DLITEVAQNALALSLPKPQS

SEQ ID NO: 9154 - protein, 20 aa, Artificial Sequence
  Description of Artificial Sequence: targeting sequence/synthetic sequence
LLEHSLSTNKLEKQILDQTS

SEQ ID NO: 9155 - protein, 20 aa, Artificial Sequence
  Description of Artificial Sequence: targeting sequence/synthetic sequence
RDKRFHYDRNNIAVGADESV

SEQ ID NO: 9156 - protein, 20 aa, Artificial Sequence
  Description of Artificial Sequence: targeting sequence/synthetic sequence
NLKIRQGLSHTADMQTREVL

SEQ ID NO: 9157 - protein, 20 aa, Artificial Sequence
  Description of Artificial Sequence: targeting sequence/synthetic sequence
PANTHNNNIEGQAIVYQNKF

SEQ ID NO: 9158 - protein, 20 aa, Artificial Sequence
  Description of Artificial Sequence: targeting sequence/synthetic sequence
SRTLYSSSPRVLSNNSDANL

SEQ ID NO: 9159 - protein, 20 aa, Artificial Sequence
  Description of Artificial Sequence: targeting sequence/synthetic sequence
KIGNDIQILRSSTNIAIEKL

SEQ ID NO: 9160 - protein, 20 aa, Artificial Sequence
  Description of Artificial Sequence: targeting sequence/synthetic sequence
LIQGSNDVEIRAEGNSRFTY

SEQ ID NO: 9161 - protein, 20 aa, Artificial Sequence
  Description of Artificial Sequence: targeting sequence/synthetic sequence
VIVEKTKQTLASVSSGPKHT

SEQ ID NO: 9162 - protein, 20 aa, Artificial Sequence
  Description of Artificial Sequence: targeting sequence/synthetic sequence
MGARGSVLSGKKTDELEKVR

SEQ ID NO: 9163 - protein, 20 aa, Artificial Sequence
  Description of Artificial Sequence: targeting sequence/synthetic sequence
VVEAVENAVARVADTIGSGP

SEQ ID NO: 9164 - protein, 20 aa, Artificial Sequence
  Description of Artificial Sequence: targeting sequence/synthetic sequence
SSSSPYVSNAVQRDAPLEYD

SEQ ID NO: 9165 - protein, 20 aa, Artificial Sequence
  Description of Artificial Sequence: targeting sequence/synthetic sequence
GNLATKARNEGRIRDSVDLQ

SEQ ID NO: 9166 - protein, 20 aa, Artificial Sequence
  Description of Artificial Sequence: targeting sequence/synthetic sequence
AKSANAIETKGFNKKDLELA

SEQ ID NO: 9167 - protein, 20 aa, Artificial Sequence
  Description of Artificial Sequence: targeting sequence/synthetic sequence
RARVDPTVENEETFMNRVEV

SEQ ID NO: 9168 - protein, 20 aa, Artificial Sequence
  Description of Artificial Sequence: targeting sequence/synthetic sequence
KNQSIDSGISSLSYNRNEVL

SEQ ID NO: 9169 - protein, 20 aa, Artificial Sequence
  Description of Artificial Sequence: targeting sequence/synthetic sequence
AVSKVLHLEGEVNKIKSALL

SEQ ID NO: 9170 - protein, 20 aa, Artificial Sequence
  Description of Artificial Sequence: targeting sequence/synthetic sequence
YREGVATQTTAYGKRTENVQ

SEQ ID NO: 9171 - protein, 20 aa, Artificial Sequence
  Description of Artificial Sequence: targeting sequence/synthetic sequence
DNGVDFNKNTALDKNYLLNN

SEQ ID NO: 9172 - protein, 20 aa, Artificial Sequence
  Description of Artificial Sequence: targeting sequence/synthetic sequence
LKAKIDQNVEELKGRLTPYA

SEQ ID NO: 9173 - protein, 20 aa, Artificial Sequence
  Description of Artificial Sequence: targeting sequence/synthetic sequence
ISFNPKENKITVKSKNLPEL

SEQ ID NO: 9174 - protein, 20 aa, Artificial Sequence
  Description of Artificial Sequence: targeting sequence/synthetic sequence
QVYTLPPSREEMTKNQVSLT

SEQ ID NO: 9175 - protein, 20 aa, Artificial Sequence
  Description of Artificial Sequence: targeting sequence/synthetic sequence
PLFNDIAAGIPSITAYSKNG

SEQ ID NO: 9176 - protein, 20 aa, Artificial Sequence
  Description of Artificial Sequence: targeting sequence/synthetic sequence
AAAMPRSAPNDILDLRLPPE

SEQ ID NO: 9177 - protein, 20 aa, Artificial Sequence
  Description of Artificial Sequence: targeting sequence/synthetic sequence
VPHSRNSITLTNLTPGTEYV

SEQ ID NO: 9178 - protein, 20 aa, Artificial Sequence
  Description of Artificial Sequence: targeting sequence/synthetic sequence
QDLGVWSNQLDGGAGVDTVK

SEQ ID NO: 9179 - protein, 20 aa, Artificial Sequence
  Description of Artificial Sequence: targeting sequence/synthetic sequence
LHLEGNKLQVLGKDLLLPQP

SEQ ID NO: 9180 - protein, 20 aa, Artificial Sequence
  Description of Artificial Sequence: targeting sequence/synthetic sequence
LQRIHNSNILDERQGLMHEL

SEQ ID NO: 9181 - protein, 20 aa, Artificial Sequence
  Description of Artificial Sequence: targeting sequence/synthetic sequence
RGPAGPNGIPGEKGPAGERG

SEQ ID NO: 9182 - protein, 20 aa, Artificial Sequence
  Description of Artificial Sequence: targeting sequence/synthetic sequence
EELGVAGNIVRHIPDRGAPT

SEQ ID NO: 9183 - protein, 20 aa, Artificial Sequence
  Description of Artificial Sequence: targeting sequence/synthetic sequence
RTLNTLVQDNSYVPRYDSNG

SEQ ID NO: 9184 - protein, 20 aa, Artificial Sequence
  Description of Artificial Sequence: targeting sequence/synthetic sequence
TNQLRSVGLNLEGNGVATDV

SEQ ID NO: 9185 - protein, 20 aa, Artificial Sequence
  Description of Artificial Sequence: targeting sequence/synthetic sequence
YAQKSPTTLQRITMTNSVDD

SEQ ID NO: 9186 - protein, 20 aa, Artificial Sequence
  Description of Artificial Sequence: targeting sequence/synthetic sequence
IAPKKTKPPVPSVQKLVEDR

SEQ ID NO: 9187 - protein, 20 aa, Artificial Sequence
  Description of Artificial Sequence: targeting sequence/synthetic sequence
LALNVGNETAKGNFENAFEI

SEQ ID NO: 9188 - protein, 20 aa, Artificial Sequence
  Description of Artificial Sequence: targeting sequence/synthetic sequence
ATKARNEGRIRDSVDLQSLM

SEQ ID NO: 9189 - protein, 20 aa, Artificial Sequence
  Description of Artificial Sequence: targeting sequence/synthetic sequence
GVDYYDNVRNVENVIGTSMK

SEQ ID NO: 9190 - protein, 20 aa, Artificial Sequence
  Description of Artificial Sequence: targeting sequence/synthetic sequence
DRITGDAQANVLRGAGGADV

SEQ ID NO: 9191 - protein, 20 aa, Artificial Sequence
  Description of Artificial Sequence: targeting sequence/synthetic sequence
IDLKDDLGNTLEKKGGKEFV

SEQ ID NO: 9192 - protein, 20 aa, Artificial Sequence
  Description of Artificial Sequence: targeting sequence/synthetic sequence
QFLNQHLNPAIESDNNFTDT

SEQ ID NO: 9193 - protein, 20 aa, Artificial Sequence
  Description of Artificial Sequence: targeting sequence/synthetic sequence
RFNEIDRKLDSHSAALEEIT

SEQ ID NO: 9194 - protein, 20 aa, Artificial Sequence
  Description of Artificial Sequence: targeting sequence/synthetic sequence
ALHTATFQALQRDLELQAAS

SEQ ID NO: 9195 - protein, 20 aa, Artificial Sequence
  Description of Artificial Sequence: targeting sequence/synthetic sequence
LRLMKDTQTISQTVALTEGL

SEQ ID NO: 9196 - protein, 20 aa, Artificial Sequence
  Description of Artificial Sequence: targeting sequence/synthetic sequence
LTKAPVDLLGVAHNNLMAMA

SEQ ID NO: 9197 - protein, 20 aa, Artificial Sequence
  Description of Artificial Sequence: targeting sequence/synthetic sequence
YQGGTYSKASTPNGYDNGII

SEQ ID NO: 9198 - protein, 20 aa, Artificial Sequence
  Description of Artificial Sequence: targeting sequence/synthetic sequence
PRSPVIGSEVFLPNSNHVAS

SEQ ID NO: 9199 - protein, 20 aa, Artificial Sequence
  Description of Artificial Sequence: targeting sequence/synthetic sequence
KLQATVQELQKRLDRLEETV

SEQ ID NO: 9200 - protein, 20 aa, Artificial Sequence
  Description of Artificial Sequence: targeting sequence/synthetic sequence
FIEQTSFYQGDVQNAVEGAM

SEQ ID NO: 9201 - protein, 20 aa, Artificial Sequence
  Description of Artificial Sequence: targeting sequence/synthetic sequence
LITITNDTTVTNDNPQSRFF

SEQ ID NO: 9202 - protein, 20 aa, Artificial Sequence
  Description of Artificial Sequence: targeting sequence/synthetic sequence
TATFQALQRDLELQAASSRE

SEQ ID NO: 9203 - protein, 20 aa, Artificial Sequence
  Description of Artificial Sequence: targeting sequence/synthetic sequence
SISYTQQNYVSEVEQQNSKS

SEQ ID NO: 9204 - protein, 20 aa, Artificial Sequence
  Description of Artificial Sequence: targeting sequence/synthetic sequence
EQTSFYQGDVQNAVEGAMVR

SEQ ID NO: 9205 - protein, 20 aa, Artificial Sequence
  Description of Artificial Sequence: targeting sequence/synthetic sequence
DDLGNTLEKKGGKEFVEAVL

SEQ ID NO: 9206 - protein, 20 aa, Artificial Sequence
  Description of Artificial Sequence: targeting sequence/synthetic sequence
KFVSNQTELDREVLVGKVKH

SEQ ID NO: 9207 - protein, 20 aa, Artificial Sequence
  Description of Artificial Sequence: targeting sequence/synthetic sequence
AKNLFLNHSENATAKDIAPT

SEQ ID NO: 9208 - protein, 20 aa, Artificial Sequence
  Description of Artificial Sequence: targeting sequence/synthetic sequence
LLGSTSDSNLNKYSTINKIP

SEQ ID NO: 9209 - protein, 20 aa, Artificial Sequence
  Description of Artificial Sequence: targeting sequence/synthetic sequence
LGGNEIQRDPGYPRDLMPPP

SEQ ID NO: 9210 - protein, 20 aa, Artificial Sequence
  Description of Artificial Sequence: targeting sequence/synthetic sequence
LRARLLPHANEVSQKIGDNL

SEQ ID NO: 9211 - protein, 20 aa, Artificial Sequence
  Description of Artificial Sequence: targeting sequence/synthetic sequence
YNRNEVLASNGDKIESFVPK

SEQ ID NO: 9212 - protein, 20 aa, Artificial Sequence
  Description of Artificial Sequence: targeting sequence/synthetic sequence
QSTDYGNFLANEASPLTVSV

SEQ ID NO: 9213 - protein, 20 aa, Artificial Sequence
  Description of Artificial Sequence: targeting sequence/synthetic sequence
TPKKVKPPLPSVTKLTEDRW

SEQ ID NO: 9214 - protein, 20 aa, Artificial Sequence
  Description of Artificial Sequence: targeting sequence/synthetic sequence
INNWISLSDNDTFAASEHGK

SEQ ID NO: 9215 - protein, 20 aa, Artificial Sequence
  Description of Artificial Sequence: targeting sequence/synthetic sequence
GKEVHALKRLRDSANANDVE

SEQ ID NO: 9216 - protein, 20 aa, Artificial Sequence
  Description of Artificial Sequence: targeting sequence/synthetic sequence
KKGHVSDLTAPDKIQTIVNL

SEQ ID NO: 9217 - protein, 20 aa, Artificial Sequence
  Description of Artificial Sequence: targeting sequence/synthetic sequence
VLGGDAQEHNKVVTKDFDEI

SEQ ID NO: 9218 - protein, 20 aa, Artificial Sequence
  Description of Artificial Sequence: targeting sequence/synthetic sequence
HGIIHRDLKPDNMLISNEGH

SEQ ID NO: 9219 - protein, 20 aa, Artificial Sequence
  Description of Artificial Sequence: targeting sequence/synthetic sequence
DGDVNELMDVVLHHVPEAKL

SEQ ID NO: 9220 - protein, 20 aa, Artificial Sequence
  Description of Artificial Sequence: targeting sequence/synthetic sequence
YYKGNIIAEAIEKLDREGQK

SEQ ID NO: 9221 - protein, 20 aa, Artificial Sequence
  Description of Artificial Sequence: targeting sequence/synthetic sequence
QMRMELERPGGNEITRGGST

SEQ ID NO: 9222 - protein, 20 aa, Artificial Sequence
  Description of Artificial Sequence: targeting sequence/synthetic sequence
SQISDINDERLQQGVSLLRD

SEQ ID NO: 9223 - protein, 20 aa, Artificial Sequence
  Description of Artificial Sequence: targeting sequence/synthetic sequence
KEQWVKDAMQHLDRQAAALT

SEQ ID NO: 9224 - protein, 20 aa, Artificial Sequence
  Description of Artificial Sequence: targeting sequence/synthetic sequence
DSQSEDRNDLKASPTLGKRK

SEQ ID NO: 9225 - protein, 20 aa, Artificial Sequence
  Description of Artificial Sequence: targeting sequence/synthetic sequence
LLLSGDKNYLISNLSNTIEK

SEQ ID NO: 9226 - protein, 20 aa, Artificial Sequence
  Description of Artificial Sequence: targeting sequence/synthetic sequence
NADGNVDYHMNSVPIQQEIL

SEQ ID NO: 9227 - protein, 20 aa, Artificial Sequence
  Description of Artificial Sequence: targeting sequence/synthetic sequence
LIIGNLVTANAESNKQNTAS

SEQ ID NO: 9228 - protein, 20 aa, Artificial Sequence
  Description of Artificial Sequence: targeting sequence/synthetic sequence
YYFDNNSKAVTGLQTIDSKK

SEQ ID NO: 9229 - protein, 20 aa, Artificial Sequence
  Description of Artificial Sequence: targeting sequence/synthetic sequence
DEVLNEVLVVPNINQSHPTT

SEQ ID NO: 9230 - protein, 20 aa, Artificial Sequence
  Description of Artificial Sequence: targeting sequence/synthetic sequence
IYSNNFNNLVKLEQSLGDGV

SEQ ID NO: 9231 - protein, 20 aa, Artificial Sequence
  Description of Artificial Sequence: targeting sequence/synthetic sequence
GYKHTLNQIDEVKVWPQQPS

SEQ ID NO: 9232 - protein, 20 aa, Artificial Sequence
  Description of Artificial Sequence: targeting sequence/synthetic sequence
LGGDAAEHNKVVTKDFDVIR

SEQ ID NO: 9233 - protein, 20 aa, Artificial Sequence
  Description of Artificial Sequence: targeting sequence/synthetic sequence
FNIASKNLKTEFNGQNKAVN

SEQ ID NO: 9234 - protein, 20 aa, Artificial Sequence
  Description of Artificial Sequence: targeting sequence/synthetic sequence
SSVLSGKKTDELEKVRLRPG

SEQ ID NO: 9235 - protein, 20 aa, Artificial Sequence
  Description of Artificial Sequence: targeting sequence/synthetic sequence
HLQSTDYGNFLANEASPLTV

SEQ ID NO: 9236 - protein, 20 aa, Artificial Sequence
  Description of Artificial Sequence: targeting sequence/synthetic sequence
HQNSQTHQASLSKQPTSQPR

SEQ ID NO: 9237 - protein, 20 aa, Artificial Sequence
  Description of Artificial Sequence: targeting sequence/synthetic sequence
KLRTEGDGVYTLNDKKQWIN

SEQ ID NO: 9238 - protein, 20 aa, Artificial Sequence
  Description of Artificial Sequence: targeting sequence/synthetic sequence
TQTAFYQNDVQNAVERSIVR

SEQ ID NO: 9239 - protein, 20 aa, Artificial Sequence
  Description of Artificial Sequence: targeting sequence/synthetic sequence
EMLENQIATIHQSCPSQEHQ

SEQ ID NO: 9240 - protein, 20 aa, Artificial Sequence
  Description of Artificial Sequence: targeting sequence/synthetic sequence
AQNNGSNFQLEEISRAQLVP

SEQ ID NO: 9241 - protein, 20 aa, Artificial Sequence
  Description of Artificial Sequence: targeting sequence/synthetic sequence
NLSSKFQFSSNKEQNGVQDP

SEQ ID NO: 9242 - protein, 20 aa, Artificial Sequence
  Description of Artificial Sequence: targeting sequence/synthetic sequence
KRDLFFNEIKARSGQDDKTV

SEQ ID NO: 9243 - protein, 20 aa, Artificial Sequence
  Description of Artificial Sequence: targeting sequence/synthetic sequence
LTWESGQVLGDQTVSDNELQ

SEQ ID NO: 9244 - protein, 20 aa, Artificial Sequence
  Description of Artificial Sequence: targeting sequence/synthetic sequence
TQRRTSMGGTQQQFVEGVRM

SEQ ID NO: 9245 - protein, 20 aa, Artificial Sequence
  Description of Artificial Sequence: targeting sequence/synthetic sequence
PPKALHTATFQALQRDLELQ

SEQ ID NO: 9246 - protein, 20 aa, Artificial Sequence
  Description of Artificial Sequence: targeting sequence/synthetic sequence
KDDLGNTLEKKGGKEFVEAV

SEQ ID NO: 9247 - protein, 20 aa, Artificial Sequence
  Description of Artificial Sequence: targeting sequence/synthetic sequence
PKEQWVKDAMQHLDRQAAAL

SEQ ID NO: 9248 - protein, 20 aa, Artificial Sequence
  Description of Artificial Sequence: targeting sequence/synthetic sequence
SKVLHLEGEVNKIKNALLST

SEQ ID NO: 9249 - protein, 20 aa, Artificial Sequence
  Description of Artificial Sequence: targeting sequence/synthetic sequence
TLNVIELNVQKTVDYTGQAK

SEQ ID NO: 9250 - protein, 20 aa, Artificial Sequence
  Description of Artificial Sequence: targeting sequence/synthetic sequence
LHTATFQALQRDLELQAASS

SEQ ID NO: 9251 - protein, 20 aa, Artificial Sequence
  Description of Artificial Sequence: targeting sequence/synthetic sequence
TLAIGDGANDVGMIQTAHVG

SEQ ID NO: 9252 - protein, 20 aa, Artificial Sequence
  Description of Artificial Sequence: targeting sequence/synthetic sequence
KARARELSSGQKDQGQAANM

SEQ ID NO: 9253 - protein, 20 aa, Artificial Sequence
  Description of Artificial Sequence: targeting sequence/synthetic sequence
KNLNVNDVLYAGHNSTWDPQ

SEQ ID NO: 9254 - protein, 20 aa, Artificial Sequence
  Description of Artificial Sequence: targeting sequence/synthetic sequence
LPGLKGENSIKVDDPTYGKV

SEQ ID NO: 9255 - protein, 20 aa, Artificial Sequence
  Description of Artificial Sequence: targeting sequence/synthetic sequence
KKQINDYVEKGTQGKIVDLV

SEQ ID NO: 9256 - protein, 20 aa, Artificial Sequence
  Description of Artificial Sequence: targeting sequence/synthetic sequence
KNSVHLQMNSLKTDDTAVYY

SEQ ID NO: 9257 - protein, 20 aa, Artificial Sequence
  Description of Artificial Sequence: targeting sequence/synthetic sequence
TPRKSNLDEEVNVIPPHTPV

SEQ ID NO: 9258 - protein, 20 aa, Artificial Sequence
  Description of Artificial Sequence: targeting sequence/synthetic sequence
KDGDNIIYQASSPDEAALVK

SEQ ID NO: 9259 - protein, 20 aa, Artificial Sequence
  Description of Artificial Sequence: targeting sequence/synthetic sequence
EWDKVVNTPNSLEKQKGVTN

SEQ ID NO: 9260 - protein, 20 aa, Artificial Sequence
  Description of Artificial Sequence: targeting sequence/synthetic sequence
VDIASNIIGDLSSLPIAGKI

SEQ ID NO: 9261 - protein, 20 aa, Artificial Sequence
  Description of Artificial Sequence: targeting sequence/synthetic sequence
AIGDGANDVGMIQTAHVGVG

SEQ ID NO: 9262 - protein, 20 aa, Artificial Sequence
  Description of Artificial Sequence: targeting sequence/synthetic sequence
GERGAPGFRGPAGPNGIPGE

SEQ ID NO: 9263 - protein, 20 aa, Artificial Sequence
  Description of Artificial Sequence: targeting sequence/synthetic sequence
PKALHTATFQALQRDLELQA

SEQ ID NO: 9264 - protein, 20 aa, Artificial Sequence
  Description of Artificial Sequence: targeting sequence/synthetic sequence
SAGTGPSSATVNVTTRKPPP

SEQ ID NO: 9265 - protein, 20 aa, Artificial Sequence
  Description of Artificial Sequence: targeting sequence/synthetic sequence
ITITNDTTVTNDNPQSRFFG

SEQ ID NO: 9266 - protein, 20 aa, Artificial Sequence
  Description of Artificial Sequence: targeting sequence/synthetic sequence
VNFNFNGLTGTGVLTESNKK

SEQ ID NO: 9267 - protein, 20 aa, Artificial Sequence
  Description of Artificial Sequence: targeting sequence/synthetic sequence
LTFQRAMHDYNQAEMKQRDN

SEQ ID NO: 9268 - protein, 20 aa, Artificial Sequence
  Description of Artificial Sequence: targeting sequence/synthetic sequence
SAEITGLGAIREDNNITLKL

SEQ ID NO: 9269 - protein, 20 aa, Artificial Sequence
  Description of Artificial Sequence: targeting sequence/synthetic sequence
ATSSNAGADPNTTNLRPTTY

SEQ ID NO: 9270 - protein, 20 aa, Artificial Sequence
  Description of Artificial Sequence: targeting sequence/synthetic sequence
SLSYNRNEVLASNGDKIESF

SEQ ID NO: 9271 - protein, 20 aa, Artificial Sequence
  Description of Artificial Sequence: targeting sequence/synthetic sequence
RPYSATAAAATGGMANVKAA

SEQ ID NO: 9272 - protein, 20 aa, Artificial Sequence
  Description of Artificial Sequence: targeting sequence/synthetic sequence
KSSLLGSTSDSNLNKYSTIN

SEQ ID NO: 9273 - protein, 20 aa, Artificial Sequence
  Description of Artificial Sequence: targeting sequence/synthetic sequence
PSDTAKPAAPGGGRAAQLKL

SEQ ID NO: 9274 - protein, 20 aa, Artificial Sequence
  Description of Artificial Sequence: targeting sequence/synthetic sequence
NNWISLSDNDTFAASEHGKR

SEQ ID NO: 9275 - protein, 20 aa, Artificial Sequence
  Description of Artificial Sequence: targeting sequence/synthetic sequence
LHHSTQENAILAIEQYEELV

SEQ ID NO: 9276 - protein, 20 aa, Artificial Sequence
  Description of Artificial Sequence: targeting sequence/synthetic sequence
LLGQTRANPMYNAVSNADLM

SEQ ID NO: 9277 - protein, 20 aa, Artificial Sequence
  Description of Artificial Sequence: targeting sequence/synthetic sequence
VNFLHSNKLTHTDLKPENIL

SEQ ID NO: 9278 - protein, 20 aa, Artificial Sequence
  Description of Artificial Sequence: targeting sequence/synthetic sequence
RVKKLNEISKLGISGDIDLT

SEQ ID NO: 9279 - protein, 20 aa, Artificial Sequence
  Description of Artificial Sequence: targeting sequence/synthetic sequence
VNNSLNVNFGAISEGKMQEE

SEQ ID NO: 9280 - protein, 20 aa, Artificial Sequence
  Description of Artificial Sequence: targeting sequence/synthetic sequence
FLVNQMINEAKKQLLEFDTQ

SEQ ID NO: 9281 - protein, 20 aa, Artificial Sequence
  Description of Artificial Sequence: targeting sequence/synthetic sequence
RLESEYNINNIEEELNKKVS

SEQ ID NO: 9282 - protein, 20 aa, Artificial Sequence
  Description of Artificial Sequence: targeting sequence/synthetic sequence
TVVPEKDGDNIIYQASSPDE

SEQ ID NO: 9283 - protein, 20 aa, Artificial Sequence
  Description of Artificial Sequence: targeting sequence/synthetic sequence
LNQQHSQIKEIENQLRRTSI

SEQ ID NO: 9284 - protein, 20 aa, Artificial Sequence
  Description of Artificial Sequence: targeting sequence/synthetic sequence
LDGDVNELMDVVLHHVPEAK

SEQ ID NO: 9285 - protein, 20 aa, Artificial Sequence
  Description of Artificial Sequence: targeting sequence/synthetic sequence
IRSAIGTPLQTISSGGTSLL

SEQ ID NO: 9286 - protein, 20 aa, Artificial Sequence
  Description of Artificial Sequence: targeting sequence/synthetic sequence
ETANSVTLSDLQPGVQYNIT

SEQ ID NO: 9287 - protein, 20 aa, Artificial Sequence
  Description of Artificial Sequence: targeting sequence/synthetic sequence
KASMGETAPRTNFNNAAINY

SEQ ID NO: 9288 - protein, 20 aa, Artificial Sequence
  Description of Artificial Sequence: targeting sequence/synthetic sequence
RLSKEVQNALARASNTAEET

SEQ ID NO: 9289 - protein, 20 aa, Artificial Sequence
  Description of Artificial Sequence: targeting sequence/synthetic sequence
LHGSRLNDRIAGDDQDNELW

SEQ ID NO: 9290 - protein, 20 aa, Artificial Sequence
  Description of Artificial Sequence: targeting sequence/synthetic sequence
AKPPLPSVSKLVEDKWNKPQ

SEQ ID NO: 9291 - protein, 20 aa, Artificial Sequence
  Description of Artificial Sequence: targeting sequence/synthetic sequence
TLTFQRAMHDYNQAEMKQRD

SEQ ID NO: 9292 - protein, 20 aa, Artificial Sequence
  Description of Artificial Sequence: targeting sequence/synthetic sequence
IEESLNKITQNSGNDVRNFE

SEQ ID NO: 9293 - protein, 20 aa, Artificial Sequence
  Description of Artificial Sequence: targeting sequence/synthetic sequence
ANTQNNNIEGQAIVYQSKFL

SEQ ID NO: 9294 - protein, 20 aa, Artificial Sequence
  Description of Artificial Sequence: targeting sequence/synthetic sequence
RAHQNSQTHQASLSKQPTSQ

SEQ ID NO: 9295 - protein, 20 aa, Artificial Sequence
  Description of Artificial Sequence: targeting sequence/synthetic sequence
GFNIASKNLKTEFNGQNKAV

SEQ ID NO: 9296 - protein, 20 aa, Artificial Sequence
  Description of Artificial Sequence: targeting sequence/synthetic sequence
LVSEFTNSNNHLAADSQAYD

SEQ ID NO: 9297 - protein, 20 aa, Artificial Sequence
  Description of Artificial Sequence: targeting sequence/synthetic sequence
LIRDKRFHYDRNNIAVGADE

SEQ ID NO: 9298 - protein, 20 aa, Artificial Sequence
  Description of Artificial Sequence: targeting sequence/synthetic sequence
KERMYNALNNQSQAIEKIIE

SEQ ID NO: 9299 - protein, 20 aa, Artificial Sequence
  Description of Artificial Sequence: targeting sequence/synthetic sequence
ATQGKEHSEMSNNVSDPKGP

SEQ ID NO: 9300 - protein, 20 aa, Artificial Sequence
  Description of Artificial Sequence: targeting sequence/synthetic sequence
IGLALNIGNEAQKGNFKDAL

SEQ ID NO: 9301 - protein, 20 aa, Artificial Sequence
  Description of Artificial Sequence: targeting sequence/synthetic sequence
NRYKILNNSLNPAISEDNDF

SEQ ID NO: 9302 - protein, 20 aa, Artificial Sequence
  Description of Artificial Sequence: targeting sequence/synthetic sequence
LLRNGVSEENLAKLIQHANV

SEQ ID NO: 9303 - protein, 20 aa, Artificial Sequence
  Description of Artificial Sequence: targeting sequence/synthetic sequence
LDGKQNTVPLETVKTNKKNV

SEQ ID NO: 9304 - protein, 20 aa, Artificial Sequence
  Description of Artificial Sequence: targeting sequence/synthetic sequence
SLNVIRSAIGTPLQTISSGG

SEQ ID NO: 9305 - protein, 20 aa, Artificial Sequence
  Description of Artificial Sequence: targeting sequence/synthetic sequence
TAALIIGNLVTANAESNKQN

SEQ ID NO: 9306 - protein, 20 aa, Artificial Sequence
  Description of Artificial Sequence: targeting sequence/synthetic sequence
AIELYNNNTHDLVGDVKLAG

SEQ ID NO: 9307 - protein, 20 aa, Artificial Sequence
  Description of Artificial Sequence: targeting sequence/synthetic sequence
FPNAVTLRSVNNQPVIVDSL

SEQ ID NO: 9308 - protein, 20 aa, Artificial Sequence
  Description of Artificial Sequence: targeting sequence/synthetic sequence
GTHNGQIGNDPNRDILIASN

SEQ ID NO: 9309 - protein, 20 aa, Artificial Sequence
  Description of Artificial Sequence: targeting sequence/synthetic sequence
LSRGVQESVQDTFPNQVTLT

SEQ ID NO: 9310 - protein, 20 aa, Artificial Sequence
  Description of Artificial Sequence: targeting sequence/synthetic sequence
AAFNAQNNGSNFQLEEISRA

SEQ ID NO: 9311 - protein, 20 aa, Artificial Sequence
  Description of Artificial Sequence: targeting sequence/synthetic sequence
LSSKSLVLGQKLSLTQSDIS

SEQ ID NO: 9312 - protein, 20 aa, Artificial Sequence
  Description of Artificial Sequence: targeting sequence/synthetic sequence
KPPLPSVQKLVEDRWNKPQE

SEQ ID NO: 9313 - protein, 20 aa, Artificial Sequence
  Description of Artificial Sequence: targeting sequence/synthetic sequence
GGDISISNGLSGGLNGNTAF

SEQ ID NO: 9314 - protein, 20 aa, Artificial Sequence
  Description of Artificial Sequence: targeting sequence/synthetic sequence
RPPLPSVTKLTEDRWNERQK

SEQ ID NO: 9315 - protein, 20 aa, Artificial Sequence
  Description of Artificial Sequence: targeting sequence/synthetic sequence
WVSLSDNDTFAASEHGKRQN

SEQ ID NO: 9316 - protein, 20 aa, Artificial Sequence
  Description of Artificial Sequence: targeting sequence/synthetic sequence
SKFQFSSNKEQNGVQDPQHE

SEQ ID NO: 9317 - protein, 20 aa, Artificial Sequence
  Description of Artificial Sequence: targeting sequence/synthetic sequence
FDTNSNSVSFNLLEQDPSGA

SEQ ID NO: 9318 - protein, 20 aa, Artificial Sequence
  Description of Artificial Sequence: targeting sequence/synthetic sequence
RSSSSPYVSNAVQRDAPLEY

SEQ ID NO: 9319 - protein, 20 aa, Artificial Sequence
  Description of Artificial Sequence: targeting sequence/synthetic sequence
TKARNEGRIRDSVDLQSLMT

SEQ ID NO: 9320 - protein, 20 aa, Artificial Sequence
  Description of Artificial Sequence: targeting sequence/synthetic sequence
EVRNALNRRAHAVGAQDVVQ

SEQ ID NO: 9321 - protein, 20 aa, Artificial Sequence
  Description of Artificial Sequence: targeting sequence/synthetic sequence
FEYFAPANTHNNNIEGQAIV

SEQ ID NO: 9322 - protein, 20 aa, Artificial Sequence
  Description of Artificial Sequence: targeting sequence/synthetic sequence
LLRGDTDVRVERKDPNQVEL

SEQ ID NO: 9323 - protein, 20 aa, Artificial Sequence
  Description of Artificial Sequence: targeting sequence/synthetic sequence
YSKHDMNKVLDLELKGDIEK

SEQ ID NO: 9324 - protein, 20 aa, Artificial Sequence
  Description of Artificial Sequence: targeting sequence/synthetic sequence
IEQIENELNQKVSIAMNNID

SEQ ID NO: 9325 - protein, 20 aa, Artificial Sequence
  Description of Artificial Sequence: targeting sequence/synthetic sequence
PAGPNGIPGEKGPAGERGAP

SEQ ID NO: 9326 - protein, 20 aa, Artificial Sequence
  Description of Artificial Sequence: targeting sequence/synthetic sequence
ERGAPGFRGPAGPNGIPGEK

SEQ ID NO: 9327 - protein, 20 aa, Artificial Sequence
  Description of Artificial Sequence: targeting sequence/synthetic sequence
LAIGDGANDVGMIQTAHVGV

SEQ ID NO: 9328 - protein, 20 aa, Artificial Sequence
  Description of Artificial Sequence: targeting sequence/synthetic sequence
YSSSPRVLSNNSDANLELIN

SEQ ID NO: 9329 - protein, 20 aa, Artificial Sequence
  Description of Artificial Sequence: targeting sequence/synthetic sequence
SLSDNDTFAASEHGKRQNYP

SEQ ID NO: 9330 - protein, 20 aa, Artificial Sequence
  Description of Artificial Sequence: targeting sequence/synthetic sequence
IKTIIESKYNSYTLEEKNEL

SEQ ID NO: 9331 - protein, 20 aa, Artificial Sequence
  Description of Artificial Sequence: targeting sequence/synthetic sequence
VDEVLNEVLVVPNINQSHPT

SEQ ID NO: 9332 - protein, 20 aa, Artificial Sequence
  Description of Artificial Sequence: targeting sequence/synthetic sequence
GKRYNDSDSSSGPSIKDKYV

SEQ ID NO: 9333 - protein, 20 aa, Artificial Sequence
  Description of Artificial Sequence: targeting sequence/synthetic sequence
GDKNYLISNLSNTIEKINTL

SEQ ID NO: 9334 - protein, 20 aa, Artificial Sequence
  Description of Artificial Sequence: targeting sequence/synthetic sequence
MFNVNDVLGAYSPHPDEQEV

SEQ ID NO: 9335 - protein, 20 aa, Artificial Sequence
  Description of Artificial Sequence: targeting sequence/synthetic sequence
NNRLPYVADKDSISQEIFEN

SEQ ID NO: 9336 - protein, 20 aa, Artificial Sequence
  Description of Artificial Sequence: targeting sequence/synthetic sequence
GSKKEPGGGAATEEGVNRIA

SEQ ID NO: 9337 - protein, 20 aa, Artificial Sequence
  Description of Artificial Sequence: targeting sequence/synthetic sequence
QFGIYNSRLSEVNIAQNNDI

SEQ ID NO: 9338 - protein, 20 aa, Artificial Sequence
  Description of Artificial Sequence: targeting sequence/synthetic sequence
GSERSGQQIVGPPRKKSPNE

SEQ ID NO: 9339 - protein, 20 aa, Artificial Sequence
  Description of Artificial Sequence: targeting sequence/synthetic sequence
NTIYTQNEGFNIASKNLKTE

SEQ ID NO: 9340 - protein, 20 aa, Artificial Sequence
  Description of Artificial Sequence: targeting sequence/synthetic sequence
FLNNLKQLPLLENQVSNLEQ

SEQ ID NO: 9341 - protein, 20 aa, Artificial Sequence
  Description of Artificial Sequence: targeting sequence/synthetic sequence
HITGTRGRSNTLSSPNSKNE

SEQ ID NO: 9342 - protein, 20 aa, Artificial Sequence
  Description of Artificial Sequence: targeting sequence/synthetic sequence
TRGRSNTLSSPNSKNEKALG

SEQ ID NO: 9343 - protein, 20 aa, Artificial Sequence
  Description of Artificial Sequence: targeting sequence/synthetic sequence
DCVAKEATEAAKCNLLAEKQ

SEQ ID NO: 9344 - protein, 20 aa, Artificial Sequence
  Description of Artificial Sequence: targeting sequence/synthetic sequence
IASKNLKTEFNGQNKAVNKE

SEQ ID NO: 9345 - protein, 20 aa, Artificial Sequence
  Description of Artificial Sequence: targeting sequence/synthetic sequence
ITKLKQLGILENQINTIHQS

SEQ ID NO: 9346 - protein, 20 aa, Artificial Sequence
  Description of Artificial Sequence: targeting sequence/synthetic sequence
KGKDLVARESLLDGGNKVVI

SEQ ID NO: 9347 - protein, 20 aa, Artificial Sequence
  Description of Artificial Sequence: targeting sequence/synthetic sequence
QILNPNETGTFSQSLTKSKE

SEQ ID NO: 9348 - protein, 20 aa, Artificial Sequence
  Description of Artificial Sequence: targeting sequence/synthetic sequence
ARGPPGPAGANGAPGLRGGA

SEQ ID NO: 9349 - protein, 20 aa, Artificial Sequence
  Description of Artificial Sequence: targeting sequence/synthetic sequence
ITSFPEGYNTVVGERGTTLS

SEQ ID NO: 9350 - protein, 20 aa, Artificial Sequence
  Description of Artificial Sequence: targeting sequence/synthetic sequence
KQTYSKFDTNSHNHDALLKN

SEQ ID NO: 9351 - protein, 20 aa, Artificial Sequence
  Description of Artificial Sequence: targeting sequence/synthetic sequence
PPDKFAANVANVSINKKIIQ

SEQ ID NO: 9352 - protein, 20 aa, Artificial Sequence
  Description of Artificial Sequence: targeting sequence/synthetic sequence
RLAARPYSATAAAATGGMAN

SEQ ID NO: 9353 - protein, 20 aa, Artificial Sequence
  Description of Artificial Sequence: targeting sequence/synthetic sequence
TKYSKHDMNKVLDLELKGDI

SEQ ID NO: 9354 - protein, 20 aa, Artificial Sequence
  Description of Artificial Sequence: targeting sequence/synthetic sequence
SSGQGQQAQTPTGKQTDKTK

SEQ ID NO: 9355 - protein, 20 aa, Artificial Sequence
  Description of Artificial Sequence: targeting sequence/synthetic sequence
DINKPGPLFKPENGLLETKV

SEQ ID NO: 9356 - protein, 20 aa, Artificial Sequence
  Description of Artificial Sequence: targeting sequence/synthetic sequence
VRAGTESEQSLQKIIDDRAK

SEQ ID NO: 9357 - protein, 20 aa, Artificial Sequence
  Description of Artificial Sequence: targeting sequence/synthetic sequence
GMGNEVDVHAAFFHGQALTN

SEQ ID NO: 9358 - protein, 20 aa, Artificial Sequence
  Description of Artificial Sequence: targeting sequence/synthetic sequence
DEIRKVIKDNATFSTKNPAY

SEQ ID NO: 9359 - protein, 20 aa, Artificial Sequence
  Description of Artificial Sequence: targeting sequence/synthetic sequence
GESRDLPSGQGINNLDNLRD

SEQ ID NO: 9360 - protein, 20 aa, Artificial Sequence
  Description of Artificial Sequence: targeting sequence/synthetic sequence
LAFTQETIDRLAGKPTHVNV

SEQ ID NO: 9361 - protein, 20 aa, Artificial Sequence
  Description of Artificial Sequence: targeting sequence/synthetic sequence
FLNQHLNPAIESDNNFTDTT

SEQ ID NO: 9362 - protein, 20 aa, Artificial Sequence
  Description of Artificial Sequence: targeting sequence/synthetic sequence
TLKSLNNQIESIRSPEGSRK

SEQ ID NO: 9363 - protein, 20 aa, Artificial Sequence
  Description of Artificial Sequence: targeting sequence/synthetic sequence
GGVTLHDNNRLTEEKKVPIN

SEQ ID NO: 9364 - protein, 20 aa, Artificial Sequence
  Description of Artificial Sequence: targeting sequence/synthetic sequence
LTLTKAPVDLLGVAHNNLMA

SEQ ID NO: 9365 - protein, 20 aa, Artificial Sequence
  Description of Artificial Sequence: targeting sequence/synthetic sequence
KKVADALTNAVAHVDDMPNA

SEQ ID NO: 9366 - protein, 20 aa, Artificial Sequence
  Description of Artificial Sequence: targeting sequence/synthetic sequence
SGISSLSYNRNEVLASNGDK

SEQ ID NO: 9367 - protein, 20 aa, Artificial Sequence
  Description of Artificial Sequence: targeting sequence/synthetic sequence
NFNFNGLTGTGVLTESNKKF

SEQ ID NO: 9368 - protein, 20 aa, Artificial Sequence
  Description of Artificial Sequence: targeting sequence/synthetic sequence
SNNSEPSRMNMTSLDAMDIS

SEQ ID NO: 9369 - protein, 20 aa, Artificial Sequence
  Description of Artificial Sequence: targeting sequence/synthetic sequence
VKKADMINKNMTHQVQAERD

SEQ ID NO: 9370 - protein, 20 aa, Artificial Sequence
  Description of Artificial Sequence: targeting sequence/synthetic sequence
KRVKAITLAIGDGANDVGMI

SEQ ID NO: 9371 - protein, 20 aa, Artificial Sequence
  Description of Artificial Sequence: targeting sequence/synthetic sequence
HDRATPQLPAQLQELEHRVA

SEQ ID NO: 9372 - protein, 20 aa, Artificial Sequence
  Description of Artificial Sequence: targeting sequence/synthetic sequence
QRSVPGHDNKMQFESSSYEG

SEQ ID NO: 9373 - protein, 20 aa, Artificial Sequence
  Description of Artificial Sequence: targeting sequence/synthetic sequence
TNSNSVSFNLLEQDPSGATT

SEQ ID NO: 9374 - protein, 20 aa, Artificial Sequence
  Description of Artificial Sequence: targeting sequence/synthetic sequence
SGAVSKAVPDRNATTLGLPN

SEQ ID NO: 9375 - protein, 20 aa, Artificial Sequence
  Description of Artificial Sequence: targeting sequence/synthetic sequence
RLMKDTQTISQTVALTEGLG

SEQ ID NO: 9376 - protein, 20 aa, Artificial Sequence
  Description of Artificial Sequence: targeting sequence/synthetic sequence
VDYYDNVRNVENVIGTSMKD

SEQ ID NO: 9377 - protein, 20 aa, Artificial Sequence
  Description of Artificial Sequence: targeting sequence/synthetic sequence
QALQNQVNAIKTIIESKYNS

SEQ ID NO: 9378 - protein, 20 aa, Artificial Sequence
  Description of Artificial Sequence: targeting sequence/synthetic sequence
PVKRSSQSTLERSEQQIRAA

SEQ ID NO: 9379 - protein, 20 aa, Artificial Sequence
  Description of Artificial Sequence: targeting sequence/synthetic sequence
QLVTNCTQRLEQGPCKDLFQ

SEQ ID NO: 9380 - protein, 20 aa, Artificial Sequence
  Description of Artificial Sequence: targeting sequence/synthetic sequence
SGQVLGDQTVSDNELQEMSN

SEQ ID NO: 9381 - protein, 20 aa, Artificial Sequence
  Description of Artificial Sequence: targeting sequence/synthetic sequence
ANASRIHYDGGAGTNTVSYA

SEQ ID NO: 9382 - protein, 20 aa, Artificial Sequence
  Description of Artificial Sequence: targeting sequence/synthetic sequence
TPSRMIRTNEAVPKTAPTNV

SEQ ID NO: 9383 - protein, 20 aa, Artificial Sequence
  Description of Artificial Sequence: targeting sequence/synthetic sequence
SLKSVNGQIESLISPDGSRK

SEQ ID NO: 9384 - protein, 20 aa, Artificial Sequence
  Description of Artificial Sequence: targeting sequence/synthetic sequence
PSFGYYSNNLKDVKVITKDN

SEQ ID NO: 9385 - protein, 20 aa, Artificial Sequence
  Description of Artificial Sequence: targeting sequence/synthetic sequence
KRLSKEVQNALARASNTAEE

SEQ ID NO: 9386 - protein, 20 aa, Artificial Sequence
  Description of Artificial Sequence: targeting sequence/synthetic sequence
ILKENYGQKEAEKVARVKAL

SEQ ID NO: 9387 - protein, 20 aa, Artificial Sequence
  Description of Artificial Sequence: targeting sequence/synthetic sequence
LMGSAEITGLGAIREDNNIT

SEQ ID NO: 9388 - protein, 20 aa, Artificial Sequence
  Description of Artificial Sequence: targeting sequence/synthetic sequence
YFAPANTQNNNIEGQAIVYQ

SEQ ID NO: 9389 - protein, 20 aa, Artificial Sequence
  Description of Artificial Sequence: targeting sequence/synthetic sequence
IARADNDVNSSLAHGHTAVD

SEQ ID NO: 9390 - protein, 20 aa, Artificial Sequence
  Description of Artificial Sequence: targeting sequence/synthetic sequence
KYGLDKNADGSYTVNENKFN

SEQ ID NO: 9391 - protein, 20 aa, Artificial Sequence
  Description of Artificial Sequence: targeting sequence/synthetic sequence
PPGPEVSRDSNTLQRESLAN

SEQ ID NO: 9392 - protein, 20 aa, Artificial Sequence
  Description of Artificial Sequence: targeting sequence/synthetic sequence
DHLNSTNHAIVQTLVNSVNS

SEQ ID NO: 9393 - protein, 20 aa, Artificial Sequence
  Description of Artificial Sequence: targeting sequence/synthetic sequence
AVAHVDDMPNALSALSDLHA

SEQ ID NO: 9394 - protein, 20 aa, Artificial Sequence
  Description of Artificial Sequence: targeting sequence/synthetic sequence
VSYDKEGNEVLTHKTWDGNY

SEQ ID NO: 9395 - protein, 20 aa, Artificial Sequence
  Description of Artificial Sequence: targeting sequence/synthetic sequence
YKGNIIAEAIEKLDREGQKF

SEQ ID NO: 9396 - protein, 20 aa, Artificial Sequence
  Description of Artificial Sequence: targeting sequence/synthetic sequence
ELEVRNALNRRAHAVGAQDV

SEQ ID NO: 9397 - protein, 20 aa, Artificial Sequence
  Description of Artificial Sequence: targeting sequence/synthetic sequence
GNQRIKVSNTLESRLDLSAK

SEQ ID NO: 9398 - protein, 20 aa, Artificial Sequence
  Description of Artificial Sequence: targeting sequence/synthetic sequence
EHTSKITTGGDVINNGLWNM

SEQ ID NO: 9399 - protein, 20 aa, Artificial Sequence
  Description of Artificial Sequence: targeting sequence/synthetic sequence
SERSGQQIVGPPRKKSPNEL

SEQ ID NO: 9400 - protein, 20 aa, Artificial Sequence
  Description of Artificial Sequence: targeting sequence/synthetic sequence
RLNDRIAGDDQDNELWGHDG

SEQ ID NO: 9401 - protein, 20 aa, Artificial Sequence
  Description of Artificial Sequence: targeting sequence/synthetic sequence
VKKLNEISKLGISGDIDLTS

SEQ ID NO: 9402 - protein, 20 aa, Artificial Sequence
  Description of Artificial Sequence: targeting sequence/synthetic sequence
LAAPPGINLVAPPSSQLNVV

SEQ ID NO: 9403 - protein, 20 aa, Artificial Sequence
  Description of Artificial Sequence: targeting sequence/synthetic sequence
KAIIESKYNSYTLEEKNELT

SEQ ID NO: 9404 - protein, 20 aa, Artificial Sequence
  Description of Artificial Sequence: targeting sequence/synthetic sequence
YNSQTIPQISNRTLNTLVQD

SEQ ID NO: 9405 - protein, 20 aa, Artificial Sequence
  Description of Artificial Sequence: targeting sequence/synthetic sequence
RLMNLHNNEAGRKVLEDRMQ

SEQ ID NO: 9406 - protein, 20 aa, Artificial Sequence
  Description of Artificial Sequence: targeting sequence/synthetic sequence
TLHDNNRLTEEKKVPINLWL

SEQ ID NO: 9407 - protein, 20 aa, Artificial Sequence
  Description of Artificial Sequence: targeting sequence/synthetic sequence
PGGNEITRGGSTSYGTGSET

SEQ ID NO: 9408 - protein, 20 aa, Artificial Sequence
  Description of Artificial Sequence: targeting sequence/synthetic sequence
LKLRYDSAVKVSSATNEALG

SEQ ID NO: 9409 - protein, 20 aa, Artificial Sequence
  Description of Artificial Sequence: targeting sequence/synthetic sequence
STNQLRSVGLNLEGNGVATD

SEQ ID NO: 9410 - protein, 20 aa, Artificial Sequence
  Description of Artificial Sequence: targeting sequence/synthetic sequence
GAKGARGSAGPPGATGFPGA

SEQ ID NO: 9411 - protein, 20 aa, Artificial Sequence
  Description of Artificial Sequence: targeting sequence/synthetic sequence
KEQMYQALQNQVNAIKTIIE

SEQ ID NO: 9412 - protein, 20 aa, Artificial Sequence
  Description of Artificial Sequence: targeting sequence/synthetic sequence
RLQQAQKGTPMKPNTQATPP

SEQ ID NO: 9413 - protein, 20 aa, Artificial Sequence
  Description of Artificial Sequence: targeting sequence/synthetic sequence
DMLENQIATIHQSCPSQEQQ

SEQ ID NO: 9414 - protein, 20 aa, Artificial Sequence
  Description of Artificial Sequence: targeting sequence/synthetic sequence
FDNNSKAVTGLQTIDSKKYY

SEQ ID NO: 9415 - protein, 20 aa, Artificial Sequence
  Description of Artificial Sequence: targeting sequence/synthetic sequence
NVWIIPERNTIGTNPSDFDP

SEQ ID NO: 9416 - protein, 20 aa, Artificial Sequence
  Description of Artificial Sequence: targeting sequence/synthetic sequence
DNDIALLHLAQPATLSQTIV

SEQ ID NO: 9417 - protein, 20 aa, Artificial Sequence
  Description of Artificial Sequence: targeting sequence/synthetic sequence
KYQFDKDSNGQYIVNEDKFQ

SEQ ID NO: 9418 - protein, 20 aa, Artificial Sequence
  Description of Artificial Sequence: targeting sequence/synthetic sequence
VKAPGFGDNRKNQLKDMAIA

SEQ ID NO: 9419 - protein, 20 aa, Artificial Sequence
  Description of Artificial Sequence: targeting sequence/synthetic sequence
NASTPPDKFAANVANVSINK

SEQ ID NO: 9420 - protein, 20 aa, Artificial Sequence
  Description of Artificial Sequence: targeting sequence/synthetic sequence
PDKFAANVANVSINKKIIQP

SEQ ID NO: 9421 - protein, 20 aa, Artificial Sequence
  Description of Artificial Sequence: targeting sequence/synthetic sequence
RVKAITLAIGDGANDVGMIQ

SEQ ID NO: 9422 - protein, 20 aa, Artificial Sequence
  Description of Artificial Sequence: targeting sequence/synthetic sequence
IADLGLAVMHSQSTNQLDVG

SEQ ID NO: 9423 - protein, 20 aa, Artificial Sequence
  Description of Artificial Sequence: targeting sequence/synthetic sequence
WGAKYNVSISSQSNDSVNAV

SEQ ID NO: 9424 - protein, 20 aa, Artificial Sequence
  Description of Artificial Sequence: targeting sequence/synthetic sequence
TDGDSNNYINAALTDSYTRS

SEQ ID NO: 9425 - protein, 20 aa, Artificial Sequence
  Description of Artificial Sequence: targeting sequence/synthetic sequence
PQKEWDKVVNTPNSLEKQKG

SEQ ID NO: 9426 - protein, 20 aa, Artificial Sequence
  Description of Artificial Sequence: targeting sequence/synthetic sequence
ILVNEPYYNEAGFDSDRGLQ

SEQ ID NO: 9427 - protein, 20 aa, Artificial Sequence
  Description of Artificial Sequence: targeting sequence/synthetic sequence
GAPGFRGPAGPNGIPGEKGP

SEQ ID NO: 9428 - protein, 20 aa, Artificial Sequence
  Description of Artificial Sequence: targeting sequence/synthetic sequence
LQLERLHLEGNKLQVLGKDL

SEQ ID NO: 9429 - protein, 20 aa, Artificial Sequence
  Description of Artificial Sequence: targeting sequence/synthetic sequence
NIKSQVENLKNSLDVKISEA

SEQ ID NO: 9430 - protein, 20 aa, Artificial Sequence
  Description of Artificial Sequence: targeting sequence/synthetic sequence
QWVKDAMQHLDRQAAALTRN

SEQ ID NO: 9431 - protein, 20 aa, Artificial Sequence
  Description of Artificial Sequence: targeting sequence/synthetic sequence
VNDVLYAGHNSTWDPQSNSI

SEQ ID NO: 9432 - protein, 20 aa, Artificial Sequence
  Description of Artificial Sequence: targeting sequence/synthetic sequence
SSATSSNAGADPNTTNLRPT

SEQ ID NO: 9433 - protein, 20 aa, Artificial Sequence
  Description of Artificial Sequence: targeting sequence/synthetic sequence
RAGTESEQSLQKIIDDRAKS

SEQ ID NO: 9434 - protein, 20 aa, Artificial Sequence
  Description of Artificial Sequence: targeting sequence/synthetic sequence
WVKDAMQHLDRQAAALTRNG

SEQ ID NO: 9435 - protein, 20 aa, Artificial Sequence
  Description of Artificial Sequence: targeting sequence/synthetic sequence
SLVLGKNQTLATIKAKENQL

SEQ ID NO: 9436 - protein, 20 aa, Artificial Sequence
  Description of Artificial Sequence: targeting sequence/synthetic sequence
THNGQIGNDPNRDILIASNW

SEQ ID NO: 9437 - protein, 20 aa, Artificial Sequence
  Description of Artificial Sequence: targeting sequence/synthetic sequence
TAGIALHQSMLNSQAIDNLR

SEQ ID NO: 9438 - protein, 20 aa, Artificial Sequence
  Description of Artificial Sequence: targeting sequence/synthetic sequence
HENGIIHRDLKPENVLLSSQ

SEQ ID NO: 9439 - protein, 20 aa, Artificial Sequence
  Description of Artificial Sequence: targeting sequence/synthetic sequence
GNEVDVHAAFFHGQALTNKN

SEQ ID NO: 9440 - protein, 20 aa, Artificial Sequence
  Description of Artificial Sequence: targeting sequence/synthetic sequence
DKTLANKLSFNFSDKQDVPV

SEQ ID NO: 9441 - protein, 20 aa, Artificial Sequence
  Description of Artificial Sequence: targeting sequence/synthetic sequence
HSLSTNKLEKQILDQTSEIN

SEQ ID NO: 9442 - protein, 20 aa, Artificial Sequence
  Description of Artificial Sequence: targeting sequence/synthetic sequence
FEFPQEEFDGNQFQKAQAIS

SEQ ID NO: 9443 - protein, 20 aa, Artificial Sequence
  Description of Artificial Sequence: targeting sequence/synthetic sequence
ALAAPPGINLVAPPSSQLNV

SEQ ID NO: 9444 - protein, 20 aa, Artificial Sequence
  Description of Artificial Sequence: targeting sequence/synthetic sequence
FTLLRTLDLGENQLETLPPD

SEQ ID NO: 9445 - protein, 20 aa, Artificial Sequence
  Description of Artificial Sequence: targeting sequence/synthetic sequence
DRKGGNSSVKLEAGLANTIT

SEQ ID NO: 9446 - protein, 20 aa, Artificial Sequence
  Description of Artificial Sequence: targeting sequence/synthetic sequence
SDQQSHLEFRVNRNNLELST

SEQ ID NO: 9447 - protein, 20 aa, Artificial Sequence
  Description of Artificial Sequence: targeting sequence/synthetic sequence
PQVYTLPPSRDELTKNQVSL

SEQ ID NO: 9448 - protein, 20 aa, Artificial Sequence
  Description of Artificial Sequence: targeting sequence/synthetic sequence
IRDKRFHYDRNNIAVGADES

SEQ ID NO: 9449 - protein, 20 aa, Artificial Sequence
  Description of Artificial Sequence: targeting sequence/synthetic sequence
PQVYTLPPSREEMTKNQVSL

SEQ ID NO: 9450 - protein, 20 aa, Artificial Sequence
  Description of Artificial Sequence: targeting sequence/synthetic sequence
ERSGQQIVGPPRKKSPNELV

SEQ ID NO: 9451 - protein, 20 aa, Artificial Sequence
  Description of Artificial Sequence: targeting sequence/synthetic sequence
RDIRDIQDENQLLVADVKRL

SEQ ID NO: 9452 - protein, 20 aa, Artificial Sequence
  Description of Artificial Sequence: targeting sequence/synthetic sequence
KRFHYDRNNIAVGADESVVK

SEQ ID NO: 9453 - protein, 20 aa, Artificial Sequence
  Description of Artificial Sequence: targeting sequence/synthetic sequence
PLAQAVRSSSRTPSDKPVAH

SEQ ID NO: 9454 - protein, 20 aa, Artificial Sequence
  Description of Artificial Sequence: targeting sequence/synthetic sequence
AFSAALKGTDVKTNGKYSDI

SEQ ID NO: 9455 - protein, 20 aa, Artificial Sequence
  Description of Artificial Sequence: targeting sequence/synthetic sequence
RFSGLSAELRNQLDVAKVSQ

SEQ ID NO: 9456 - protein, 20 aa, Artificial Sequence
  Description of Artificial Sequence: targeting sequence/synthetic sequence
RTLEIPGNSDPNMIPDGDFN

SEQ ID NO: 9457 - protein, 20 aa, Artificial Sequence
  Description of Artificial Sequence: targeting sequence/synthetic sequence
LRGDTDVRVERKDPNQVELW

SEQ ID NO: 9458 - protein, 20 aa, Artificial Sequence
  Description of Artificial Sequence: targeting sequence/synthetic sequence
AALIIGNLVTANAESNKQNT

SEQ ID NO: 9459 - protein, 20 aa, Artificial Sequence
  Description of Artificial Sequence: targeting sequence/synthetic sequence
SSANNRDNTYNRVSEDLRSR

SEQ ID NO: 9460 - protein, 20 aa, Artificial Sequence
  Description of Artificial Sequence: targeting sequence/synthetic sequence
PGAKGARGSAGPPGATGFPG

SEQ ID NO: 9461 - protein, 20 aa, Artificial Sequence
  Description of Artificial Sequence: targeting sequence/synthetic sequence
QNMRLPNLLGHETMKEVLEQ

SEQ ID NO: 9462 - protein, 20 aa, Artificial Sequence
  Description of Artificial Sequence: targeting sequence/synthetic sequence
GKVRSEGTNSTLTLSPVSFE

SEQ ID NO: 9463 - protein, 20 aa, Artificial Sequence
  Description of Artificial Sequence: targeting sequence/synthetic sequence
LNSTNHAIVQTLVNSVNSSI

SEQ ID NO: 9464 - protein, 20 aa, Artificial Sequence
  Description of Artificial Sequence: targeting sequence/synthetic sequence
KKALLIQGSNDVEIRAEGNS

SEQ ID NO: 9465 - protein, 20 aa, Artificial Sequence
  Description of Artificial Sequence: targeting sequence/synthetic sequence
LAQAVRSSSRTPSDKPVAHV

SEQ ID NO: 9466 - protein, 20 aa, Artificial Sequence
  Description of Artificial Sequence: targeting sequence/synthetic sequence
AIFFLPDEGKLQHLENELTH

SEQ ID NO: 9467 - protein, 20 aa, Artificial Sequence
  Description of Artificial Sequence: targeting sequence/synthetic sequence
EQLCIHPEVKKQESNHLQIH

SEQ ID NO: 9468 - protein, 20 aa, Artificial Sequence
  Description of Artificial Sequence: targeting sequence/synthetic sequence
PGRPGFNGLPGNPGVQGQKG

SEQ ID NO: 9469 - protein, 20 aa, Artificial Sequence
  Description of Artificial Sequence: targeting sequence/synthetic sequence
SPTTLQRITMTNSVDDALIN

SEQ ID NO: 9470 - protein, 20 aa, Artificial Sequence
  Description of Artificial Sequence: targeting sequence/synthetic sequence
ANATRIPAKTPPAPKTPPSS

SEQ ID NO: 9471 - protein, 20 aa, Artificial Sequence
  Description of Artificial Sequence: targeting sequence/synthetic sequence
LNKLLGKVTIAQGGVLPNIQ

SEQ ID NO: 9472 - protein, 20 aa, Artificial Sequence
  Description of Artificial Sequence: targeting sequence/synthetic sequence
ARESLLDGGNKVVISGFGDP

SEQ ID NO: 9473 - protein, 20 aa, Artificial Sequence
  Description of Artificial Sequence: targeting sequence/synthetic sequence
GRKLTPQGQRDLDRIAGQVA

SEQ ID NO: 9474 - protein, 20 aa, Artificial Sequence
  Description of Artificial Sequence: targeting sequence/synthetic sequence
AAGVAHAITAACTQGNLSDC

SEQ ID NO: 9475 - protein, 20 aa, Artificial Sequence
  Description of Artificial Sequence: targeting sequence/synthetic sequence
ISKAKGQPREPQVYTLPPSQ

SEQ ID NO: 9476 - protein, 20 aa, Artificial Sequence
  Description of Artificial Sequence: targeting sequence/synthetic sequence
LHGLVADSNLTLGPGLQPLP

SEQ ID NO: 9477 - protein, 20 aa, Artificial Sequence
  Description of Artificial Sequence: targeting sequence/synthetic sequence
NSHINASNNSEPSRMNMTSL

SEQ ID NO: 9478 - protein, 20 aa, Artificial Sequence
  Description of Artificial Sequence: targeting sequence/synthetic sequence
RVSQPLRPSQLKQPNGVNSQ

SEQ ID NO: 9479 - protein, 20 aa, Artificial Sequence
  Description of Artificial Sequence: targeting sequence/synthetic sequence
HSYGGGATNANARAKGGTGQ

SEQ ID NO: 9480 - protein, 20 aa, Artificial Sequence
  Description of Artificial Sequence: targeting sequence/synthetic sequence
QQSHQAGYANAADRESGIPA

SEQ ID NO: 9481 - protein, 20 aa, Artificial Sequence
  Description of Artificial Sequence: targeting sequence/synthetic sequence
GAKYNVSISSQSNDSVNAVD

SEQ ID NO: 9482 - protein, 20 aa, Artificial Sequence
  Description of Artificial Sequence: targeting sequence/synthetic sequence
YGNFLANHTNPLTVSKIDTE

SEQ ID NO: 9483 - protein, 20 aa, Artificial Sequence
  Description of Artificial Sequence: targeting sequence/synthetic sequence
PSIQTGSEEIRSLYNTVATL

SEQ ID NO: 9484 - protein, 20 aa, Artificial Sequence
  Description of Artificial Sequence: targeting sequence/synthetic sequence
FPQEEFDGNQFQKAEAISVL

SEQ ID NO: 9485 - protein, 20 aa, Artificial Sequence
  Description of Artificial Sequence: targeting sequence/synthetic sequence
FWAVKDTMQAQDNITSARLL

SEQ ID NO: 9486 - protein, 20 aa, Artificial Sequence
  Description of Artificial Sequence: targeting sequence/synthetic sequence
KTKQTLASVSSGPKHTQSVP

SEQ ID NO: 9487 - protein, 20 aa, Artificial Sequence
  Description of Artificial Sequence: targeting sequence/synthetic sequence
YIIQHGSILGESQQELNSMV

SEQ ID NO: 9488 - protein, 20 aa, Artificial Sequence
  Description of Artificial Sequence: targeting sequence/synthetic sequence
ASNNSEPSRMNMTSLDAMDI

SEQ ID NO: 9489 - protein, 20 aa, Artificial Sequence
  Description of Artificial Sequence: targeting sequence/synthetic sequence
LKIRQGLSHTADMQTREVLM

SEQ ID NO: 9490 - protein, 20 aa, Artificial Sequence
  Description of Artificial Sequence: targeting sequence/synthetic sequence
GVDDLITEVAQNALALSLPK

SEQ ID NO: 9491 - protein, 20 aa, Artificial Sequence
  Description of Artificial Sequence: targeting sequence/synthetic sequence
ANFTLLRTLDLGENQLETLP

SEQ ID NO: 9492 - protein, 20 aa, Artificial Sequence
  Description of Artificial Sequence: targeting sequence/synthetic sequence
SHINASNNSEPSRMNMTSLD

SEQ ID NO: 9493 - protein, 20 aa, Artificial Sequence
  Description of Artificial Sequence: targeting sequence/synthetic sequence
SSLLGSTSDSNLNKYSTINK

SEQ ID NO: 9494 - protein, 20 aa, Artificial Sequence
  Description of Artificial Sequence: targeting sequence/synthetic sequence
GLQRRRFVQNALNGNGDSNN

SEQ ID NO: 9495 - protein, 20 aa, Artificial Sequence
  Description of Artificial Sequence: targeting sequence/synthetic sequence
IALHQSMLNSQAIDNLRASL

SEQ ID NO: 9496 - protein, 20 aa, Artificial Sequence
  Description of Artificial Sequence: targeting sequence/synthetic sequence
RVVAGNSIGIGEPSEPSELL

SEQ ID NO: 9497 - protein, 20 aa, Artificial Sequence
  Description of Artificial Sequence: targeting sequence/synthetic sequence
DTLNVIELNVQKTVDYTGQA

SEQ ID NO: 9498 - protein, 20 aa, Artificial Sequence
  Description of Artificial Sequence: targeting sequence/synthetic sequence
DVFHIVKTLRNNKSNMVETL

SEQ ID NO: 9499 - protein, 20 aa, Artificial Sequence
  Description of Artificial Sequence: targeting sequence/synthetic sequence
GDAQANVLRGAGGADVLAGG

SEQ ID NO: 9500 - protein, 20 aa, Artificial Sequence
  Description of Artificial Sequence: targeting sequence/synthetic sequence
HSRNSITLTNLTPGTEYVVS

SEQ ID NO: 9501 - protein, 20 aa, Artificial Sequence
  Description of Artificial Sequence: targeting sequence/synthetic sequence
RRVPLEEFNTNIASVTVNKL

SEQ ID NO: 9502 - protein, 20 aa, Artificial Sequence
  Description of Artificial Sequence: targeting sequence/synthetic sequence
LPGLMDMQAVDRAQPLGFNK

SEQ ID NO: 9503 - protein, 20 aa, Artificial Sequence
  Description of Artificial Sequence: targeting sequence/synthetic sequence
TLKQTYSKFDTNSHNHDALL

SEQ ID NO: 9504 - protein, 20 aa, Artificial Sequence
  Description of Artificial Sequence: targeting sequence/synthetic sequence
NQNNADIQVVNAISSLTYPG

SEQ ID NO: 9505 - protein, 20 aa, Artificial Sequence
  Description of Artificial Sequence: targeting sequence/synthetic sequence
AIADLGLAVKHDSILNTIDI

SEQ ID NO: 9506 - protein, 20 aa, Artificial Sequence
  Description of Artificial Sequence: targeting sequence/synthetic sequence
KEPGGGAATEEGVNRIAVPK

SEQ ID NO: 9507 - protein, 20 aa, Artificial Sequence
  Description of Artificial Sequence: targeting sequence/synthetic sequence
ALIIGNLVTANAESNKQNTA

SEQ ID NO: 9508 - protein, 20 aa, Artificial Sequence
  Description of Artificial Sequence: targeting sequence/synthetic sequence
TTDNDIALLHLAQPATLSQT

SEQ ID NO: 9509 - protein, 20 aa, Artificial Sequence
  Description of Artificial Sequence: targeting sequence/synthetic sequence
LVNEPYYNEAGFDSDRGLQE

SEQ ID NO: 9510 - protein, 20 aa, Artificial Sequence
  Description of Artificial Sequence: targeting sequence/synthetic sequence
ADELVSEFTNSNNHLAADSQ

SEQ ID NO: 9511 - protein, 20 aa, Artificial Sequence
  Description of Artificial Sequence: targeting sequence/synthetic sequence
GSDDEGRYLTQETNKVETYK

SEQ ID NO: 9512 - protein, 20 aa, Artificial Sequence
  Description of Artificial Sequence: targeting sequence/synthetic sequence
DLGLAVKHDSILNTIDIPQN

SEQ ID NO: 9513 - protein, 20 aa, Artificial Sequence
  Description of Artificial Sequence: targeting sequence/synthetic sequence
NGGFHFSYGDDNLAPNTANV

SEQ ID NO: 9514 - protein, 20 aa, Artificial Sequence
  Description of Artificial Sequence: targeting sequence/synthetic sequence
QRIHNSNILDERQGLMHELM

SEQ ID NO: 9515 - protein, 20 aa, Artificial Sequence
  Description of Artificial Sequence: targeting sequence/synthetic sequence
TDYGNFLANEASPLTVSVID

SEQ ID NO: 9516 - protein, 20 aa, Artificial Sequence
  Description of Artificial Sequence: targeting sequence/synthetic sequence
KAPGFGDNRKNQLKDMAIAT

SEQ ID NO: 9517 - protein, 20 aa, Artificial Sequence
  Description of Artificial Sequence: targeting sequence/synthetic sequence
LKQTYSKFDTNSHNHDALLK

SEQ ID NO: 9518 - protein, 20 aa, Artificial Sequence
  Description of Artificial Sequence: targeting sequence/synthetic sequence
STTDNDIALLHLAQPATLSQ

SEQ ID NO: 9519 - protein, 20 aa, Artificial Sequence
  Description of Artificial Sequence: targeting sequence/synthetic sequence
NVYREGVATQTTAYGKRTEN

SEQ ID NO: 9520 - protein, 20 aa, Artificial Sequence
  Description of Artificial Sequence: targeting sequence/synthetic sequence
HYDGGAGTNTVSYAALGRQD

SEQ ID NO: 9521 - protein, 20 aa, Artificial Sequence
  Description of Artificial Sequence: targeting sequence/synthetic sequence
RLKIQSENVPNATIYPGQSI

SEQ ID NO: 9522 - protein, 20 aa, Artificial Sequence
  Description of Artificial Sequence: targeting sequence/synthetic sequence
YTFGGDISISNGLSGGLNGN

SEQ ID NO: 9523 - protein, 20 aa, Artificial Sequence
  Description of Artificial Sequence: targeting sequence/synthetic sequence
LSGKVRSEGTNSTLTLSPVS

SEQ ID NO: 9524 - protein, 20 aa, Artificial Sequence
  Description of Artificial Sequence: targeting sequence/synthetic sequence
YLGDRRVPLEEFNTNIASVT

SEQ ID NO: 9525 - protein, 20 aa, Artificial Sequence
  Description of Artificial Sequence: targeting sequence/synthetic sequence
DARSAMNKHNNEAGRTTILD

SEQ ID NO: 9526 - protein, 20 aa, Artificial Sequence
  Description of Artificial Sequence: targeting sequence/synthetic sequence
LQIYPDGKVNGSHEANMLSV

SEQ ID NO: 9527 - protein, 20 aa, Artificial Sequence
  Description of Artificial Sequence: targeting sequence/synthetic sequence
KNNRLPYVADKDSISQEIFE

SEQ ID NO: 9528 - protein, 20 aa, Artificial Sequence
  Description of Artificial Sequence: targeting sequence/synthetic sequence
AKKLINDYVKNGTRGKITDL

SEQ ID NO: 9529 - protein, 20 aa, Artificial Sequence
  Description of Artificial Sequence: targeting sequence/synthetic sequence
YYQGGTYSKASTPNGYDNGI

SEQ ID NO: 9530 - protein, 20 aa, Artificial Sequence
  Description of Artificial Sequence: targeting sequence/synthetic sequence
RTKGAGNMVNGLANNAEIDD

SEQ ID NO: 9531 - protein, 20 aa, Artificial Sequence
  Description of Artificial Sequence: targeting sequence/synthetic sequence
KKPSDTAKPAAPGGGRAAQL

SEQ ID NO: 9532 - protein, 20 aa, Artificial Sequence
  Description of Artificial Sequence: targeting sequence/synthetic sequence
NLPGLMDMQAVDRAQPLGFN

SEQ ID NO: 9533 - protein, 20 aa, Artificial Sequence
  Description of Artificial Sequence: targeting sequence/synthetic sequence
SILGESQQELNSMVTDTLNN

SEQ ID NO: 9534 - protein, 20 aa, Artificial Sequence
  Description of Artificial Sequence: targeting sequence/synthetic sequence
NDVEIRAEGNSRFTYTALKD

SEQ ID NO: 9535 - protein, 20 aa, Artificial Sequence
  Description of Artificial Sequence: targeting sequence/synthetic sequence
QILKENYGQKEAEKVARVKA

SEQ ID NO: 9536 - protein, 20 aa, Artificial Sequence
  Description of Artificial Sequence: targeting sequence/synthetic sequence
NGLSGGLNGNTAFSETINYK

SEQ ID NO: 9537 - protein, 20 aa, Artificial Sequence
  Description of Artificial Sequence: targeting sequence/synthetic sequence
NARRLMNLHNNEAGRKVLED

SEQ ID NO: 9538 - protein, 20 aa, Artificial Sequence
  Description of Artificial Sequence: targeting sequence/synthetic sequence
QHGSILGESQQELNSMVTDT

SEQ ID NO: 9539 - protein, 20 aa, Artificial Sequence
  Description of Artificial Sequence: targeting sequence/synthetic sequence
MKRTALVANTSNMPVAAREA

SEQ ID NO: 9540 - protein, 20 aa, Artificial Sequence
  Description of Artificial Sequence: targeting sequence/synthetic sequence
RGDTDVRVERKDPNQVELWG

SEQ ID NO: 9541 - protein, 20 aa, Artificial Sequence
  Description of Artificial Sequence: targeting sequence/synthetic sequence
IFFQRSVPGHDNKMQFESSS

SEQ ID NO: 9542 - protein, 20 aa, Artificial Sequence
  Description of Artificial Sequence: targeting sequence/synthetic sequence
TYSKFDTNSHNHDALLKNYG

SEQ ID NO: 9543 - protein, 20 aa, Artificial Sequence
  Description of Artificial Sequence: targeting sequence/synthetic sequence
QTFPSNIENLQLTNSLNDAL

SEQ ID NO: 9544 - protein, 20 aa, Artificial Sequence
  Description of Artificial Sequence: targeting sequence/synthetic sequence
ETTKQLINLKEINANVVSSP

SEQ ID NO: 9545 - protein, 20 aa, Artificial Sequence
  Description of Artificial Sequence: targeting sequence/synthetic sequence
GGRKLTPQGQRDLDRIAGQV

SEQ ID NO: 9546 - protein, 20 aa, Artificial Sequence
  Description of Artificial Sequence: targeting sequence/synthetic sequence
KIQTIMNAIPDLKIVPIDPI

SEQ ID NO: 9547 - protein, 20 aa, Artificial Sequence
  Description of Artificial Sequence: targeting sequence/synthetic sequence
VRAGTESEQSLQKIIDDRAQ

SEQ ID NO: 9548 - protein, 20 aa, Artificial Sequence
  Description of Artificial Sequence: targeting sequence/synthetic sequence
GFIHRDIKPDNLLLDSKGHV

SEQ ID NO: 9549 - protein, 20 aa, Artificial Sequence
  Description of Artificial Sequence: targeting sequence/synthetic sequence
LINLKEINANVVSSPGLLSA

SEQ ID NO: 9550 - protein, 20 aa, Artificial Sequence
  Description of Artificial Sequence: targeting sequence/synthetic sequence
MDINKPGPLFKPENGLLETK

SEQ ID NO: 9551 - protein, 20 aa, Artificial Sequence
  Description of Artificial Sequence: targeting sequence/synthetic sequence
QVDQVIRNALASPGSGGDLG

SEQ ID NO: 9552 - protein, 20 aa, Artificial Sequence
  Description of Artificial Sequence: targeting sequence/synthetic sequence
VRSSSRTPSDKPVAHVVANP

SEQ ID NO: 9553 - protein, 20 aa, Artificial Sequence
  Description of Artificial Sequence: targeting sequence/synthetic sequence
KPSDTAKPAAPGGGRAAQLK

SEQ ID NO: 9554 - protein, 20 aa, Artificial Sequence
  Description of Artificial Sequence: targeting sequence/synthetic sequence
HLTGQTLKQTYSKFDTNSHN

SEQ ID NO: 9555 - protein, 20 aa, Artificial Sequence
  Description of Artificial Sequence: targeting sequence/synthetic sequence
VVLGGDAQEHNKVVTKDFDE

SEQ ID NO: 9556 - protein, 20 aa, Artificial Sequence
  Description of Artificial Sequence: targeting sequence/synthetic sequence
KKEPGGGAATEEGVNRIAVP

SEQ ID NO: 9557 - protein, 20 aa, Artificial Sequence
  Description of Artificial Sequence: targeting sequence/synthetic sequence
PQMRMELERPGGNEITRGGS

SEQ ID NO: 9558 - protein, 20 aa, Artificial Sequence
  Description of Artificial Sequence: targeting sequence/synthetic sequence
LDTDQVYGNIATYNFENGRV

SEQ ID NO: 9559 - protein, 20 aa, Artificial Sequence
  Description of Artificial Sequence: targeting sequence/synthetic sequence
ADVRHEIPVLPNRVGLPINQ

SEQ ID NO: 9560 - protein, 20 aa, Artificial Sequence
  Description of Artificial Sequence: targeting sequence/synthetic sequence
TLSLDTSKNQFSLRLNSVTA

SEQ ID NO: 9561 - protein, 20 aa, Artificial Sequence
  Description of Artificial Sequence: targeting sequence/synthetic sequence
HHSTQENAILAIEQYEELVD

SEQ ID NO: 9562 - protein, 20 aa, Artificial Sequence
  Description of Artificial Sequence: targeting sequence/synthetic sequence
LKVTGVPGTEFVQKLNDKAA

SEQ ID NO: 9563 - protein, 20 aa, Artificial Sequence
  Description of Artificial Sequence: targeting sequence/synthetic sequence
PHSRNSITLTNLTPGTEYVV

SEQ ID NO: 9564 - protein, 20 aa, Artificial Sequence
  Description of Artificial Sequence: targeting sequence/synthetic sequence
SAGIPSLVNNELILHDKATS

SEQ ID NO: 9565 - protein, 20 aa, Artificial Sequence
  Description of Artificial Sequence: targeting sequence/synthetic sequence
MYNALNNQSQAIEKIIEDQY

SEQ ID NO: 9566 - protein, 20 aa, Artificial Sequence
  Description of Artificial Sequence: targeting sequence/synthetic sequence
FAPANTVNDNIYGQAVEYSG

SEQ ID NO: 9567 - protein, 20 aa, Artificial Sequence
  Description of Artificial Sequence: targeting sequence/synthetic sequence
VAAHITGTRGRSNTLSSPNS

SEQ ID NO: 9568 - protein, 20 aa, Artificial Sequence
  Description of Artificial Sequence: targeting sequence/synthetic sequence
SFTAVVLGGDAQEHNKVVTK

SEQ ID NO: 9569 - protein, 20 aa, Artificial Sequence
  Description of Artificial Sequence: targeting sequence/synthetic sequence
IINNKNFDKVTGMGVRNGTD

SEQ ID NO: 9570 - protein, 20 aa, Artificial Sequence
  Description of Artificial Sequence: targeting sequence/synthetic sequence
LRLKIQSENVPNATIYPGQS

SEQ ID NO: 9571 - protein, 20 aa, Artificial Sequence
  Description of Artificial Sequence: targeting sequence/synthetic sequence
ADGNVDYHMNSVPIQQEILV

SEQ ID NO: 9572 - protein, 20 aa, Artificial Sequence
  Description of Artificial Sequence: targeting sequence/synthetic sequence
NLTHLPANLLQGASKLQELH

SEQ ID NO: 9573 - protein, 20 aa, Artificial Sequence
  Description of Artificial Sequence: targeting sequence/synthetic sequence
TTGADVRHEIPVLPNRVGLP

SEQ ID NO: 9574 - protein, 20 aa, Artificial Sequence
  Description of Artificial Sequence: targeting sequence/synthetic sequence
RGSALEEKENKILVKETGYF

SEQ ID NO: 9575 - protein, 20 aa, Artificial Sequence
  Description of Artificial Sequence: targeting sequence/synthetic sequence
LVDTGIGMTKADLINNLGTI

SEQ ID NO: 9576 - protein, 20 aa, Artificial Sequence
  Description of Artificial Sequence: targeting sequence/synthetic sequence
FLNNLKQLPLLENQISNLEQ

SEQ ID NO: 9577 - protein, 20 aa, Artificial Sequence
  Description of Artificial Sequence: targeting sequence/synthetic sequence
IVTRINDISHTQSVSSKQKV

SEQ ID NO: 9578 - protein, 20 aa, Artificial Sequence
  Description of Artificial Sequence: targeting sequence/synthetic sequence
IYKNNTHDLVGDVRLAGVIM

SEQ ID NO: 9579 - protein, 20 aa, Artificial Sequence
  Description of Artificial Sequence: targeting sequence/synthetic sequence
FITSFPEGYNTVVGERGTTL

SEQ ID NO: 9580 - protein, 20 aa, Artificial Sequence
  Description of Artificial Sequence: targeting sequence/synthetic sequence
GANVLNGLAGNDVLSGGAGD

SEQ ID NO: 9581 - protein, 20 aa, Artificial Sequence
  Description of Artificial Sequence: targeting sequence/synthetic sequence
SIFRGIQAYNEIENVLKSKQ

SEQ ID NO: 9582 - protein, 20 aa, Artificial Sequence
  Description of Artificial Sequence: targeting sequence/synthetic sequence
ALTLTKAPVDLLGVAHNNLM

SEQ ID NO: 9583 - protein, 20 aa, Artificial Sequence
  Description of Artificial Sequence: targeting sequence/synthetic sequence
KTIVTRINDISHTQSVSSKQ

SEQ ID NO: 9584 - protein, 20 aa, Artificial Sequence
  Description of Artificial Sequence: targeting sequence/synthetic sequence
LNVIRSAIGTPLQTISSGGT

SEQ ID NO: 9585 - protein, 20 aa, Artificial Sequence
  Description of Artificial Sequence: targeting sequence/synthetic sequence
IHSANVLHRDLKPSNLLLNT

SEQ ID NO: 9586 - protein, 20 aa, Artificial Sequence
  Description of Artificial Sequence: targeting sequence/synthetic sequence
VRSNLPGLMDMQAVDRAQPL

SEQ ID NO: 9587 - protein, 20 aa, Artificial Sequence
  Description of Artificial Sequence: targeting sequence/synthetic sequence
NNGSNFQLEEISRAQLVPLP

SEQ ID NO: 9588 - protein, 20 aa, Artificial Sequence
  Description of Artificial Sequence: targeting sequence/synthetic sequence
DNVRNVENVIGTSMKDVLIG

SEQ ID NO: 9589 - protein, 20 aa, Artificial Sequence
  Description of Artificial Sequence: targeting sequence/synthetic sequence
GPEVSRDSNTLQRESLANPL

SEQ ID NO: 9590 - protein, 20 aa, Artificial Sequence
  Description of Artificial Sequence: targeting sequence/synthetic sequence
NEGRIRDSVDLQSLMTEMNR

SEQ ID NO: 9591 - protein, 20 aa, Artificial Sequence
  Description of Artificial Sequence: targeting sequence/synthetic sequence
NSSFTAVVLGGDAQEHNKVV

SEQ ID NO: 9592 - protein, 20 aa, Artificial Sequence
  Description of Artificial Sequence: targeting sequence/synthetic sequence
LVAVLGSQAQFTNDAETELM

SEQ ID NO: 9593 - protein, 20 aa, Artificial Sequence
  Description of Artificial Sequence: targeting sequence/synthetic sequence
IALHQSMLSSQAIDNLRASL

SEQ ID NO: 9594 - protein, 20 aa, Artificial Sequence
  Description of Artificial Sequence: targeting sequence/synthetic sequence
WLNRRANALLANGVELRDNQ

SEQ ID NO: 9595 - protein, 20 aa, Artificial Sequence
  Description of Artificial Sequence: targeting sequence/synthetic sequence
KLRYDSAVKVSSATNEALGR

SEQ ID NO: 9596 - protein, 20 aa, Artificial Sequence
  Description of Artificial Sequence: targeting sequence/synthetic sequence
RGVQESVQDTFPNQVTLTNI

SEQ ID NO: 9597 - protein, 20 aa, Artificial Sequence
  Description of Artificial Sequence: targeting sequence/synthetic sequence
FGYYSNNLKDVKVITKDNVN

SEQ ID NO: 9598 - protein, 20 aa, Artificial Sequence
  Description of Artificial Sequence: targeting sequence/synthetic sequence
SLQTGSEERKSLYNTVATLY

SEQ ID NO: 9599 - protein, 20 aa, Artificial Sequence
  Description of Artificial Sequence: targeting sequence/synthetic sequence
GVQQSVQDAFPNNVILSSIN

SEQ ID NO: 9600 - protein, 20 aa, Artificial Sequence
  Description of Artificial Sequence: targeting sequence/synthetic sequence
RVVATNPIGTGDPSTPSRMI

SEQ ID NO: 9601 - protein, 20 aa, Artificial Sequence
  Description of Artificial Sequence: targeting sequence/synthetic sequence
SKEVQNALARASNTAEETIS

SEQ ID NO: 9602 - protein, 20 aa, Artificial Sequence
  Description of Artificial Sequence: targeting sequence/synthetic sequence
LKHKYETALKVGSTTNEAAG

SEQ ID NO: 9603 - protein, 20 aa, Artificial Sequence
  Description of Artificial Sequence: targeting sequence/synthetic sequence
INGGFHFSYGDDNLAPNTAN

SEQ ID NO: 9604 - protein, 20 aa, Artificial Sequence
  Description of Artificial Sequence: targeting sequence/synthetic sequence
RRYQSRVTQGLVAGETAQQI

SEQ ID NO: 9605 - protein, 20 aa, Artificial Sequence
  Description of Artificial Sequence: targeting sequence/synthetic sequence
LYTVLHRLGHPEPNHVTEAS

SEQ ID NO: 9606 - protein, 20 aa, Artificial Sequence
  Description of Artificial Sequence: targeting sequence/synthetic sequence
YHLAVKAYNSAGTGPSSATV

SEQ ID NO: 9607 - protein, 20 aa, Artificial Sequence
  Description of Artificial Sequence: targeting sequence/synthetic sequence
VSSQILNPNETGTFSQSLTK

SEQ ID NO: 9608 - protein, 20 aa, Artificial Sequence
  Description of Artificial Sequence: targeting sequence/synthetic sequence
ALVANTSNMPVAAREASIYT

SEQ ID NO: 9609 - protein, 20 aa, Artificial Sequence
  Description of Artificial Sequence: targeting sequence/synthetic sequence
YKLRTEGDGVYTLNDKKQWI

SEQ ID NO: 9610 - protein, 20 aa, Artificial Sequence
  Description of Artificial Sequence: targeting sequence/synthetic sequence
RKEKDKTRADSVANKLGSFS

SEQ ID NO: 9611 - protein, 20 aa, Artificial Sequence
  Description of Artificial Sequence: targeting sequence/synthetic sequence
IIMKVGQDPNAVTPEQLTTS

SEQ ID NO: 9612 - protein, 20 aa, Artificial Sequence
  Description of Artificial Sequence: targeting sequence/synthetic sequence
SNLPGLMDMQAVDRAQPLGF

SEQ ID NO: 9613 - protein, 20 aa, Artificial Sequence
  Description of Artificial Sequence: targeting sequence/synthetic sequence
FRVNRNNLELSTPLKIETIS

SEQ ID NO: 9614 - protein, 20 aa, Artificial Sequence
  Description of Artificial Sequence: targeting sequence/synthetic sequence
AKIPGLLNQTSRSLDQIPGY

SEQ ID NO: 9615 - protein, 20 aa, Artificial Sequence
  Description of Artificial Sequence: targeting sequence/synthetic sequence
YIHSANVLHRDLKPSNLLLN

SEQ ID NO: 9616 - protein, 20 aa, Artificial Sequence
  Description of Artificial Sequence: targeting sequence/synthetic sequence
GRTLEIPGNSDPNMIPDGDF

SEQ ID NO: 9617 - protein, 20 aa, Artificial Sequence
  Description of Artificial Sequence: targeting sequence/synthetic sequence
EETIDTVISNALQLSQPKPQ

SEQ ID NO: 9618 - protein, 20 aa, Artificial Sequence
  Description of Artificial Sequence: targeting sequence/synthetic sequence
WFGNLATKARNEGRIRDSVD

SEQ ID NO: 9619 - protein, 20 aa, Artificial Sequence
  Description of Artificial Sequence: targeting sequence/synthetic sequence
MKTRNGSMKAADNFLDPNKA

SEQ ID NO: 9620 - protein, 20 aa, Artificial Sequence
  Description of Artificial Sequence: targeting sequence/synthetic sequence
IIINNKNFDKVTGMGVRNGT

SEQ ID NO: 9621 - protein, 20 aa, Artificial Sequence
  Description of Artificial Sequence: targeting sequence/synthetic sequence
LKGYFSQEVNISLHYQKDEE

SEQ ID NO: 9622 - protein, 20 aa, Artificial Sequence
  Description of Artificial Sequence: targeting sequence/synthetic sequence
CINADGNVDYHMNSVPIQQE

SEQ ID NO: 9623 - protein, 20 aa, Artificial Sequence
  Description of Artificial Sequence: targeting sequence/synthetic sequence
SSFTAVVLGGDAAEHNKVVT

SEQ ID NO: 9624 - protein, 20 aa, Artificial Sequence
  Description of Artificial Sequence: targeting sequence/synthetic sequence
SSQRSPEAAGVQDPSLRWSP

SEQ ID NO: 9625 - protein, 20 aa, Artificial Sequence
  Description of Artificial Sequence: targeting sequence/synthetic sequence
TINKIPQLTLNFSEVKTEKK

SEQ ID NO: 9626 - protein, 20 aa, Artificial Sequence
  Description of Artificial Sequence: targeting sequence/synthetic sequence
PNMFNVNDVLGAYSPHPDEQ

SEQ ID NO: 9627 - protein, 20 aa, Artificial Sequence
  Description of Artificial Sequence: targeting sequence/synthetic sequence
VYWTDTGTNRIEVGNLDGSM

SEQ ID NO: 9628 - protein, 20 aa, Artificial Sequence
  Description of Artificial Sequence: targeting sequence/synthetic sequence
VAVLGSQAQFTNDAETELMM

SEQ ID NO: 9629 - protein, 20 aa, Artificial Sequence
  Description of Artificial Sequence: targeting sequence/synthetic sequence
SRMIRTNEAVPKTAPTNVSG

SEQ ID NO: 9630 - protein, 20 aa, Artificial Sequence
  Description of Artificial Sequence: targeting sequence/synthetic sequence
GAGTNTVSYAALGRQDSITV

SEQ ID NO: 9631 - protein, 20 aa, Artificial Sequence
  Description of Artificial Sequence: targeting sequence/synthetic sequence
DQQTSQNIKNQLAELNATNI

SEQ ID NO: 9632 - protein, 20 aa, Artificial Sequence
  Description of Artificial Sequence: targeting sequence/synthetic sequence
SNGLSGGLNGNTAFSETINY

SEQ ID NO: 9633 - protein, 20 aa, Artificial Sequence
  Description of Artificial Sequence: targeting sequence/synthetic sequence
YIVARPVYSTNAFEENHKKT

SEQ ID NO: 9634 - protein, 20 aa, Artificial Sequence
  Description of Artificial Sequence: targeting sequence/synthetic sequence
AVVLGGDAQEHNKVVTKDFD

SEQ ID NO: 9635 - protein, 20 aa, Artificial Sequence
  Description of Artificial Sequence: targeting sequence/synthetic sequence
FDEIRKVIKDNATFSTKNPA

SEQ ID NO: 9636 - protein, 20 aa, Artificial Sequence
  Description of Artificial Sequence: targeting sequence/synthetic sequence
TKPPLPSVQKLVEDRWNKPQ

SEQ ID NO: 9637 - protein, 20 aa, Artificial Sequence
  Description of Artificial Sequence: targeting sequence/synthetic sequence
RLPNLLGHETMKEVLEQAGA

SEQ ID NO: 9638 - protein, 20 aa, Artificial Sequence
  Description of Artificial Sequence: targeting sequence/synthetic sequence
GNQYIVARPVYSTNAFEENH

SEQ ID NO: 9639 - protein, 20 aa, Artificial Sequence
  Description of Artificial Sequence: targeting sequence/synthetic sequence
PFVTQTAFYQNDVQNAVERS

SEQ ID NO: 9640 - protein, 20 aa, Artificial Sequence
  Description of Artificial Sequence: targeting sequence/synthetic sequence
KTLANKLSFNFSDKQDVPVS

SEQ ID NO: 9641 - protein, 20 aa, Artificial Sequence
  Description of Artificial Sequence: targeting sequence/synthetic sequence
LKSLSQQIENIRSPEGSRKN

SEQ ID NO: 9642 - protein, 20 aa, Artificial Sequence
  Description of Artificial Sequence: targeting sequence/synthetic sequence
AFWAVKDTMQAQDNITSARL

SEQ ID NO: 9643 - protein, 20 aa, Artificial Sequence
  Description of Artificial Sequence: targeting sequence/synthetic sequence
ILKQTYSKFDTNSHNHDALL

SEQ ID NO: 9644 - protein, 20 aa, Artificial Sequence
  Description of Artificial Sequence: targeting sequence/synthetic sequence
PGGHSYGGGATNANARAKGG

SEQ ID NO: 9645 - protein, 20 aa, Artificial Sequence
  Description of Artificial Sequence: targeting sequence/synthetic sequence
TSLVLGKNQTLATIKAKENQ

SEQ ID NO: 9646 - protein, 20 aa, Artificial Sequence
  Description of Artificial Sequence: targeting sequence/synthetic sequence
KNYLISNLSNTIEKINTLGL

SEQ ID NO: 9647 - protein, 20 aa, Artificial Sequence
  Description of Artificial Sequence: targeting sequence/synthetic sequence
SYRVGVSIRTNTAFQPDAAM

SEQ ID NO: 9648 - protein, 20 aa, Artificial Sequence
  Description of Artificial Sequence: targeting sequence/synthetic sequence
SFLVNQMINEAKKQLLEFDT

SEQ ID NO: 9649 - protein, 20 aa, Artificial Sequence
  Description of Artificial Sequence: targeting sequence/synthetic sequence
ITAFNHPLNLTKQQLSEVAL

SEQ ID NO: 9650 - protein, 20 aa, Artificial Sequence
  Description of Artificial Sequence: targeting sequence/synthetic sequence
YISFNPKENKITVKSKNLPE

SEQ ID NO: 9651 - protein, 20 aa, Artificial Sequence
  Description of Artificial Sequence: targeting sequence/synthetic sequence
GPGPGPGPGADMQRSYDSYY

SEQ ID NO: 9652 - protein, 20 aa, Artificial Sequence
  Description of Artificial Sequence: targeting sequence/synthetic sequence
YRLQQAQKGTPMKPNTQATP

SEQ ID NO: 9653 - protein, 20 aa, Artificial Sequence
  Description of Artificial Sequence: targeting sequence/synthetic sequence
KGYFSQEVNISLHYQKDEEP

SEQ ID NO: 9654 - protein, 20 aa, Artificial Sequence
  Description of Artificial Sequence: targeting sequence/synthetic sequence
NFTLLRTLDLGENQLETLPP

SEQ ID NO: 9655 - protein, 20 aa, Artificial Sequence
  Description of Artificial Sequence: targeting sequence/synthetic sequence
FERRTKGAGNMVNGLANNAE

SEQ ID NO: 9656 - protein, 20 aa, Artificial Sequence
  Description of Artificial Sequence: targeting sequence/synthetic sequence
VKRKPININIDLPGLKGENS

SEQ ID NO: 9657 - protein, 20 aa, Artificial Sequence
  Description of Artificial Sequence: targeting sequence/synthetic sequence
ISTEANRVEAHGEATATAPP

SEQ ID NO: 9658 - protein, 20 aa, Artificial Sequence
  Description of Artificial Sequence: targeting sequence/synthetic sequence
RAKIPGLLNQTSRSLDQIPG

SEQ ID NO: 9659 - protein, 20 aa, Artificial Sequence
  Description of Artificial Sequence: targeting sequence/synthetic sequence
GTAGKISSISQPGNDFSTKD

SEQ ID NO: 9660 - protein, 20 aa, Artificial Sequence
  Description of Artificial Sequence: targeting sequence/synthetic sequence
LGIKSLVSKGTLVQTKGTGA

SEQ ID NO: 9661 - protein, 20 aa, Artificial Sequence
  Description of Artificial Sequence: targeting sequence/synthetic sequence
RGDFSSANNRDNTYNRVSED

SEQ ID NO: 9662 - protein, 20 aa, Artificial Sequence
  Description of Artificial Sequence: targeting sequence/synthetic sequence
NTRNNMIQTKPTGTQQSTNT

SEQ ID NO: 9663 - protein, 20 aa, Artificial Sequence
  Description of Artificial Sequence: targeting sequence/synthetic sequence
ARSPSPSTQPWEHVNAIQEA

SEQ ID NO: 9664 - protein, 20 aa, Artificial Sequence
  Description of Artificial Sequence: targeting sequence/synthetic sequence
LSGGVQQSVQDTFPNNVILS

SEQ ID NO: 9665 - protein, 20 aa, Artificial Sequence
  Description of Artificial Sequence: targeting sequence/synthetic sequence
RKPININIDLPGLKGENSIK

SEQ ID NO: 9666 - protein, 20 aa, Artificial Sequence
  Description of Artificial Sequence: targeting sequence/synthetic sequence
ELTNKYDIKQIENELNQKVS

SEQ ID NO: 9667 - protein, 20 aa, Artificial Sequence
  Description of Artificial Sequence: targeting sequence/synthetic sequence
AGVAHAITAACTQGNLSDCG

SEQ ID NO: 9668 - protein, 20 aa, Artificial Sequence
  Description of Artificial Sequence: targeting sequence/synthetic sequence
HLLHGLVADSNLTLGPGLQP

SEQ ID NO: 9669 - protein, 20 aa, Artificial Sequence
  Description of Artificial Sequence: targeting sequence/synthetic sequence
LSFKRGSALEEKENKILVKE

SEQ ID NO: 9670 - protein, 20 aa, Artificial Sequence
  Description of Artificial Sequence: targeting sequence/synthetic sequence
TAFNHPLNLTKQQLSEVALM

SEQ ID NO: 9671 - protein, 20 aa, Artificial Sequence
  Description of Artificial Sequence: targeting sequence/synthetic sequence
GHSYGGGATNANARAKGGTG

SEQ ID NO: 9672 - protein, 20 aa, Artificial Sequence
  Description of Artificial Sequence: targeting sequence/synthetic sequence
LRLDTDQVYGNIATYNFENG

SEQ ID NO: 9673 - protein, 20 aa, Artificial Sequence
  Description of Artificial Sequence: targeting sequence/synthetic sequence
NKVLLAMNLHNNEAGRQAVA

SEQ ID NO: 9674 - protein, 20 aa, Artificial Sequence
  Description of Artificial Sequence: targeting sequence/synthetic sequence
KALVQNDTLLQVKGTGANGS

SEQ ID NO: 9675 - protein, 20 aa, Artificial Sequence
  Description of Artificial Sequence: targeting sequence/synthetic sequence
KQFTAPPGTVKVQETVITQR

SEQ ID NO: 9676 - protein, 20 aa, Artificial Sequence
  Description of Artificial Sequence: targeting sequence/synthetic sequence
QSHLEFRVNRNNLELSTPLK

SEQ ID NO: 9677 - protein, 20 aa, Artificial Sequence
  Description of Artificial Sequence: targeting sequence/synthetic sequence
SFGYYSNNLKDVKVITKDNV

SEQ ID NO: 9678 - protein, 20 aa, Artificial Sequence
  Description of Artificial Sequence: targeting sequence/synthetic sequence
SRFFLQGIQLNTILPDARDP

SEQ ID NO: 9679 - protein, 20 aa, Artificial Sequence
  Description of Artificial Sequence: targeting sequence/synthetic sequence
QYKQLNQQHSQIKEIENQLR

SEQ ID NO: 9680 - protein, 20 aa, Artificial Sequence
  Description of Artificial Sequence: targeting sequence/synthetic sequence
TAPPGTVKVQETVITQRGLA

SEQ ID NO: 9681 - protein, 20 aa, Artificial Sequence
  Description of Artificial Sequence: targeting sequence/synthetic sequence
RYQFLNQHLNPAIESDNNFT

SEQ ID NO: 9682 - protein, 20 aa, Artificial Sequence
  Description of Artificial Sequence: targeting sequence/synthetic sequence
WRLLRGDTDVRVERKDPNQV

SEQ ID NO: 9683 - protein, 20 aa, Artificial Sequence
  Description of Artificial Sequence: targeting sequence/synthetic sequence
MRRYQSRVTQGLVAGETAQQ

SEQ ID NO: 9684 - protein, 20 aa, Artificial Sequence
  Description of Artificial Sequence: targeting sequence/synthetic sequence
HLEFRVNRNNLELSTPLKIE

SEQ ID NO: 9685 - protein, 20 aa, Artificial Sequence
  Description of Artificial Sequence: targeting sequence/synthetic sequence
NAHEFITSFPEGYNTVVGER

SEQ ID NO: 9686 - protein, 20 aa, Artificial Sequence
  Description of Artificial Sequence: targeting sequence/synthetic sequence
IWIIPERNVIGTTPQDFHPP

SEQ ID NO: 9687 - protein, 20 aa, Artificial Sequence
  Description of Artificial Sequence: targeting sequence/synthetic sequence
PSPSTQPWEHVNAIQEARRL

SEQ ID NO: 9688 - protein, 20 aa, Artificial Sequence
  Description of Artificial Sequence: targeting sequence/synthetic sequence
FNFDQQTSQNIKNQLAELNA

SEQ ID NO: 9689 - protein, 20 aa, Artificial Sequence
  Description of Artificial Sequence: targeting sequence/synthetic sequence
LSGGVQQSVQDAFPNNVILS

SEQ ID NO: 9690 - protein, 20 aa, Artificial Sequence
  Description of Artificial Sequence: targeting sequence/synthetic sequence
YFFFRENAIDGEHSGKATHA

SEQ ID NO: 9691 - protein, 20 aa, Artificial Sequence
  Description of Artificial Sequence: targeting sequence/synthetic sequence
REQLCIHPEVKKQESNHLQI

SEQ ID NO: 9692 - protein, 20 aa, Artificial Sequence
  Description of Artificial Sequence: targeting sequence/synthetic sequence
DFNIYSNNFNNLVKLEQSLG

SEQ ID NO: 9693 - protein, 20 aa, Artificial Sequence
  Description of Artificial Sequence: targeting sequence/synthetic sequence
REANAHEFITSFPEGYNTVV

SEQ ID NO: 9694 - protein, 20 aa, Artificial Sequence
  Description of Artificial Sequence: targeting sequence/synthetic sequence
RTGQIFNQSYSKFDTKSHND

SEQ ID NO: 9695 - protein, 20 aa, Artificial Sequence
  Description of Artificial Sequence: targeting sequence/synthetic sequence
MGARNSVLRGKKADELEKIR

SEQ ID NO: 9696 - protein, 20 aa, Artificial Sequence
  Description of Artificial Sequence: targeting sequence/synthetic sequence
EFITSFPEGYNTVVGERGTT

SEQ ID NO: 9697 - protein, 20 aa, Artificial Sequence
  Description of Artificial Sequence: targeting sequence/synthetic sequence
RAASRANTVRSFHHEESLEE

SEQ ID NO: 9698 - protein, 20 aa, Artificial Sequence
  Description of Artificial Sequence: targeting sequence/synthetic sequence
LGTRGRTCNKTSKAIDGCEL

SEQ ID NO: 9699 - protein, 20 aa, Artificial Sequence
  Description of Artificial Sequence: targeting sequence/synthetic sequence
AVLGSQAQFTNDAETELMMS

SEQ ID NO: 9700 - protein, 20 aa, Artificial Sequence
  Description of Artificial Sequence: targeting sequence/synthetic sequence
CPGSSQRSPEAAGVQDPSLR

SEQ ID NO: 9701 - protein, 20 aa, Artificial Sequence
  Description of Artificial Sequence: targeting sequence/synthetic sequence
MYQALQNQVNAIKTIIESKY

SEQ ID NO: 9702 - protein, 20 aa, Artificial Sequence
  Description of Artificial Sequence: targeting sequence/synthetic sequence
LEKRLQALETKQQEELASIL

SEQ ID NO: 9703 - protein, 20 aa, Artificial Sequence
  Description of Artificial Sequence: targeting sequence/synthetic sequence
AYPESKTPLTATLSKSGNTF

SEQ ID NO: 9704 - protein, 20 aa, Artificial Sequence
  Description of Artificial Sequence: targeting sequence/synthetic sequence
VVAHREQREGSLQVGNEAPV

SEQ ID NO: 9705 - protein, 20 aa, Artificial Sequence
  Description of Artificial Sequence: targeting sequence/synthetic sequence
SDSAVFFEQGTTRIGGSYKK

SEQ ID NO: 9706 - protein, 20 aa, Artificial Sequence
  Description of Artificial Sequence: targeting sequence/synthetic sequence
TSTTSPATPSAGGAASSRTP

SEQ ID NO: 9707 - protein, 20 aa, Artificial Sequence
  Description of Artificial Sequence: targeting sequence/synthetic sequence
GPKGYGYGQGAGTLSTDKGE

SEQ ID NO: 9708 - protein, 20 aa, Artificial Sequence
  Description of Artificial Sequence: targeting sequence/synthetic sequence
KIIGQLQSSLQTGSEELKSL

SEQ ID NO: 9709 - protein, 20 aa, Artificial Sequence
  Description of Artificial Sequence: targeting sequence/synthetic sequence
FLGAAGSTMGAASITLTAQV

SEQ ID NO: 9710 - protein, 20 aa, Artificial Sequence
  Description of Artificial Sequence: targeting sequence/synthetic sequence
SQVQLQESGPGLVKPSETLS

SEQ ID NO: 9711 - protein, 20 aa, Artificial Sequence
  Description of Artificial Sequence: targeting sequence/synthetic sequence
IGQLQPSLQTGSEELKSLYN

SEQ ID NO: 9712 - protein, 20 aa, Artificial Sequence
  Description of Artificial Sequence: targeting sequence/synthetic sequence
AHREQREGSLQVGNEAPVTG

SEQ ID NO: 9713 - protein, 20 aa, Artificial Sequence
  Description of Artificial Sequence: targeting sequence/synthetic sequence
AGPKGEPGSPGENGAPGQMG

SEQ ID NO: 9714 - protein, 20 aa, Artificial Sequence
  Description of Artificial Sequence: targeting sequence/synthetic sequence
GQLQPSIQTGSEEIRSLYNT

SEQ ID NO: 9715 - protein, 20 aa, Artificial Sequence
  Description of Artificial Sequence: targeting sequence/synthetic sequence
GPGPGPGADMQRSYDSYYYP

SEQ ID NO: 9716 - protein, 20 aa, Artificial Sequence
  Description of Artificial Sequence: targeting sequence/synthetic sequence
QQILVQLQPALQTGTEEIKS

SEQ ID NO: 9717 - protein, 20 aa, Artificial Sequence
  Description of Artificial Sequence: targeting sequence/synthetic sequence
EGAMVRVADTVQTSATNSER

SEQ ID NO: 9718 - protein, 20 aa, Artificial Sequence
  Description of Artificial Sequence: targeting sequence/synthetic sequence
AVEGAMVRVADTVQTSATNS

SEQ ID NO: 9719 - protein, 20 aa, Artificial Sequence
  Description of Artificial Sequence: targeting sequence/synthetic sequence
PQDVDSVCSGTLQKTEDVHL

SEQ ID NO: 9720 - protein, 20 aa, Artificial Sequence
  Description of Artificial Sequence: targeting sequence/synthetic sequence
FLGAAGSTMGAVSVALTGQA

SEQ ID NO: 9721 - protein, 20 aa, Artificial Sequence
  Description of Artificial Sequence: targeting sequence/synthetic sequence
APGSDSAVFFEQGTTRIGGS

SEQ ID NO: 9722 - protein, 20 aa, Artificial Sequence
  Description of Artificial Sequence: targeting sequence/synthetic sequence
PGPAGPKGSPGEAGRPGEAG

SEQ ID NO: 9723 - protein, 20 aa, Artificial Sequence
  Description of Artificial Sequence: targeting sequence/synthetic sequence
VEGAMVRVADTVQTSATNSE

SEQ ID NO: 9724 - protein, 20 aa, Artificial Sequence
  Description of Artificial Sequence: targeting sequence/synthetic sequence
STTSPATPSAGGAASSRTPN

SEQ ID NO: 9725 - protein, 20 aa, Artificial Sequence
  Description of Artificial Sequence: targeting sequence/synthetic sequence
NDQPQNVDSVCSGTLQKTED

SEQ ID NO: 9726 - protein, 20 aa, Artificial Sequence
  Description of Artificial Sequence: targeting sequence/synthetic sequence
VDLQESGPGLVKPSETLSLT

SEQ ID NO: 9727 - protein, 20 aa, Artificial Sequence
  Description of Artificial Sequence: targeting sequence/synthetic sequence
IQTAHVGVGISGNEGMQATN

SEQ ID NO: 9728 - protein, 20 aa, Artificial Sequence
  Description of Artificial Sequence: targeting sequence/synthetic sequence
QTAHVGVGISGNEGMQATNN

SEQ ID NO: 9729 - protein, 20 aa, Artificial Sequence
  Description of Artificial Sequence: targeting sequence/synthetic sequence
YLTAEILELAGNASRDNKKT

SEQ ID NO: 9730 - protein, 20 aa, Artificial Sequence
  Description of Artificial Sequence: targeting sequence/synthetic sequence
LPGELAKHAVSEGTKAVTKY

SEQ ID NO: 9731 - protein, 20 aa, Artificial Sequence
  Description of Artificial Sequence: targeting sequence/synthetic sequence
EVIVEKTKQTVASISSGPKH

SEQ ID NO: 9732 - protein, 20 aa, Artificial Sequence
  Description of Artificial Sequence: targeting sequence/synthetic sequence
AQDVVQLKEKKESRENPPPK

SEQ ID NO: 9733 - protein, 20 aa, Artificial Sequence
  Description of Artificial Sequence: targeting sequence/synthetic sequence
SGYSDPQPAPKKLKTSESST

SEQ ID NO: 9734 - protein, 20 aa, Artificial Sequence
  Description of Artificial Sequence: targeting sequence/synthetic sequence
DFKLRLMKDTQTISQTDALT

SEQ ID NO: 9735 - protein, 20 aa, Artificial Sequence
  Description of Artificial Sequence: targeting sequence/synthetic sequence
RQILGQLQSSLQTGSEELKS

SEQ ID NO: 9736 - protein, 20 aa, Artificial Sequence
  Description of Artificial Sequence: targeting sequence/synthetic sequence
LNQSSDELQLSMGNAMFVKE

SEQ ID NO: 9737 - protein, 20 aa, Artificial Sequence
  Description of Artificial Sequence: targeting sequence/synthetic sequence
ELEEVIVEKTKQTLASVSSG

SEQ ID NO: 9738 - protein, 20 aa, Artificial Sequence
  Description of Artificial Sequence: targeting sequence/synthetic sequence
FKLRLMKDTQTISQTDALTE

SEQ ID NO: 9739 - protein, 20 aa, Artificial Sequence
  Description of Artificial Sequence: targeting sequence/synthetic sequence
EYLTAEILELAGNASRDNKK

SEQ ID NO: 9740 - protein, 20 aa, Artificial Sequence
  Description of Artificial Sequence: targeting sequence/synthetic sequence
QMAPEIQPPSHHFSPEQRAL

SEQ ID NO: 9741 - protein, 20 aa, Artificial Sequence
  Description of Artificial Sequence: targeting sequence/synthetic sequence
LLPGELAKHAVSEGTKAVTK

SEQ ID NO: 9742 - protein, 20 aa, Artificial Sequence
  Description of Artificial Sequence: targeting sequence/synthetic sequence
EFFSEGCAPGSKKDSSLCKL

SEQ ID NO: 9743 - protein, 20 aa, Artificial Sequence
  Description of Artificial Sequence: targeting sequence/synthetic sequence
PPQMAPEIQPPSHHFSPEQR

SEQ ID NO: 9744 - protein, 20 aa, Artificial Sequence
  Description of Artificial Sequence: targeting sequence/synthetic sequence
NQSSDELQLSMGNAMFVKEQ

SEQ ID NO: 9745 - protein, 20 aa, Artificial Sequence
  Description of Artificial Sequence: targeting sequence/synthetic sequence
DVVQLKEKKESRENPPPKLR

SEQ ID NO: 9746 - protein, 20 aa, Artificial Sequence
  Description of Artificial Sequence: targeting sequence/synthetic sequence
LAQDVVQLKEKKESRENPPP

SEQ ID NO: 9747 - protein, 20 aa, Artificial Sequence
  Description of Artificial Sequence: targeting sequence/synthetic sequence
EYLTAEILELAGNAARDNKK

SEQ ID NO: 9748 - protein, 20 aa, Artificial Sequence
  Description of Artificial Sequence: targeting sequence/synthetic sequence
QRRQFLRMAVKELETVLADE

SEQ ID NO: 9749 - protein, 20 aa, Artificial Sequence
  Description of Artificial Sequence: targeting sequence/synthetic sequence
TGDSDPQPAPKKMKTSESST

SEQ ID NO: 9750 - protein, 20 aa, Artificial Sequence
  Description of Artificial Sequence: targeting sequence/synthetic sequence
VDNNREPHSAESDVTRFLFD

SEQ ID NO: 9751 - protein, 20 aa, Artificial Sequence
  Description of Artificial Sequence: targeting sequence/synthetic sequence
EVAQGALTLSLPKQQDSLPD

SEQ ID NO: 9752 - protein, 20 aa, Artificial Sequence
  Description of Artificial Sequence: targeting sequence/synthetic sequence
DNNREPHSAESDVTRFLFDE

SEQ ID NO: 9753 - protein, 20 aa, Artificial Sequence
  Description of Artificial Sequence: targeting sequence/synthetic sequence
TPTGDSDPQPAPKKMKTSES

SEQ ID NO: 9754 - protein, 20 aa, Artificial Sequence
  Description of Artificial Sequence: targeting sequence/synthetic sequence
GEAGKPGRPGERGPPGPQGA

SEQ ID NO: 9755 - protein, 20 aa, Artificial Sequence
  Description of Artificial Sequence: targeting sequence/synthetic sequence
MSETVPAASASAGVAAMEKL

SEQ ID NO: 9756 - protein, 20 aa, Artificial Sequence
  Description of Artificial Sequence: targeting sequence/synthetic sequence
DEFFSEGCAPGSKKDSSLCK

SEQ ID NO: 9757 - protein, 20 aa, Artificial Sequence
  Description of Artificial Sequence: targeting sequence/synthetic sequence
QGALTLSLPKQQDSLPDTKA

SEQ ID NO: 9758 - protein, 20 aa, Artificial Sequence
  Description of Artificial Sequence: targeting sequence/synthetic sequence
RRQFLRMAVKELETVLADEP

SEQ ID NO: 9759 - protein, 20 aa, Artificial Sequence
  Description of Artificial Sequence: targeting sequence/synthetic sequence
SIYVYKVLKQVHPDTGISSK

SEQ ID NO: 9760 - protein, 20 aa, Artificial Sequence
  Description of Artificial Sequence: targeting sequence/synthetic sequence
ETVPPAPAASAAPEKPLAGK

SEQ ID NO: 9761 - protein, 20 aa, Artificial Sequence
  Description of Artificial Sequence: targeting sequence/synthetic sequence
TGAKGEPGPVGVQGPPGPAG

SEQ ID NO: 9762 - protein, 20 aa, Artificial Sequence
  Description of Artificial Sequence: targeting sequence/synthetic sequence
GPRGSPGERGETGPPGPAGF

SEQ ID NO: 9763 - protein, 20 aa, Artificial Sequence
  Description of Artificial Sequence: targeting sequence/synthetic sequence
MSETVPPAPAASAAPEKPLA

SEQ ID NO: 9764 - protein, 20 aa, Artificial Sequence
  Description of Artificial Sequence: targeting sequence/synthetic sequence
RKLEKSEDEPPLTLPKPSLI

SEQ ID NO: 9765 - protein, 20 aa, Artificial Sequence
  Description of Artificial Sequence: targeting sequence/synthetic sequence
LTANLEAQALWKEPGSNVTM

SEQ ID NO: 9766 - protein, 20 aa, Artificial Sequence
  Description of Artificial Sequence: targeting sequence/synthetic sequence
ETTGVEGPKGDTGPRGPRGP

SEQ ID NO: 9767 - protein, 20 aa, Artificial Sequence
  Description of Artificial Sequence: targeting sequence/synthetic sequence
VTQSQGSSSQSQGISSSSTS

SEQ ID NO: 9768 - protein, 20 aa, Artificial Sequence
  Description of Artificial Sequence: targeting sequence/synthetic sequence
SQGSSSQSQGISSSSTSTMP

SEQ ID NO: 9769 - protein, 20 aa, Artificial Sequence
  Description of Artificial Sequence: targeting sequence/synthetic sequence
INPTNADIDLKDDLGNTLEK

SEQ ID NO: 9770 - protein, 20 aa, Artificial Sequence
  Description of Artificial Sequence: targeting sequence/synthetic sequence
SSLVETPPAENKPRKRQLSE

SEQ ID NO: 9771 - protein, 20 aa, Artificial Sequence
  Description of Artificial Sequence: targeting sequence/synthetic sequence
NISVTDPSGKSLLLDPPTNV

SEQ ID NO: 9772 - protein, 20 aa, Artificial Sequence
  Description of Artificial Sequence: targeting sequence/synthetic sequence
DISHVLETETIFTPSSVKKK

SEQ ID NO: 9773 - protein, 20 aa, Artificial Sequence
  Description of Artificial Sequence: targeting sequence/synthetic sequence
LFGDETLQKYQSSNAQRSSE

SEQ ID NO: 9774 - protein, 20 aa, Artificial Sequence
  Description of Artificial Sequence: targeting sequence/synthetic sequence
GYSDPQPAPKKLKTSESSTI

SEQ ID NO: 9775 - protein, 20 aa, Artificial Sequence
  Description of Artificial Sequence: targeting sequence/synthetic sequence
SFTAGVPGFVLDTNASVSNG

SEQ ID NO: 9776 - protein, 20 aa, Artificial Sequence
  Description of Artificial Sequence: targeting sequence/synthetic sequence
VQEKQQNISPLVRERGPQRV

SEQ ID NO: 9777 - protein, 20 aa, Artificial Sequence
  Description of Artificial Sequence: targeting sequence/synthetic sequence
MPETSSGYSDPQPAPKKLKT

SEQ ID NO: 9778 - protein, 20 aa, Artificial Sequence
  Description of Artificial Sequence: targeting sequence/synthetic sequence
SPTTAPPAPPSPSPSPVPKS

SEQ ID NO: 9779 - protein, 20 aa, Artificial Sequence
  Description of Artificial Sequence: targeting sequence/synthetic sequence
VPSLFVTKEGTNDGWKNAAH

SEQ ID NO: 9780 - protein, 20 aa, Artificial Sequence
  Description of Artificial Sequence: targeting sequence/synthetic sequence
QDSSLVETPPAENKPRKRQL

SEQ ID NO: 9781 - protein, 20 aa, Artificial Sequence
  Description of Artificial Sequence: targeting sequence/synthetic sequence
VVAFRELVEPRKQDADSLQR

SEQ ID NO: 9782 - protein, 20 aa, Artificial Sequence
  Description of Artificial Sequence: targeting sequence/synthetic sequence
PTTAPPAPPSPSPSPVPKSP

SEQ ID NO: 9783 - protein, 20 aa, Artificial Sequence
  Description of Artificial Sequence: targeting sequence/synthetic sequence
TSSGYSDPQPAPKKLKTSES

SEQ ID NO: 9784 - protein, 20 aa, Artificial Sequence
  Description of Artificial Sequence: targeting sequence/synthetic sequence
AIINPTNADIDLKDDLGNTL

SEQ ID NO: 9785 - protein, 20 aa, Artificial Sequence
  Description of Artificial Sequence: targeting sequence/synthetic sequence
IEDHFIDLPRKKISNFTNKN

SEQ ID NO: 9786 - protein, 20 aa, Artificial Sequence
  Description of Artificial Sequence: targeting sequence/synthetic sequence
PLNGKVTNEGTTSTLTMNPV

SEQ ID NO: 9787 - protein, 20 aa, Artificial Sequence
  Description of Artificial Sequence: targeting sequence/synthetic sequence
QEVFDGNQFQKAQAISAFHE

SEQ ID NO: 9788 - protein, 20 aa, Artificial Sequence
  Description of Artificial Sequence: targeting sequence/synthetic sequence
GGLIDSPSINLDVRKQYKRD

SEQ ID NO: 9789 - protein, 20 aa, Artificial Sequence
  Description of Artificial Sequence: targeting sequence/synthetic sequence
KVTESASVMPSQDVSGSEDT

SEQ ID NO: 9790 - protein, 20 aa, Artificial Sequence
  Description of Artificial Sequence: targeting sequence/synthetic sequence
LKVDNAETIKKELGLSLTEP

SEQ ID NO: 9791 - protein, 20 aa, Artificial Sequence
  Description of Artificial Sequence: targeting sequence/synthetic sequence
FSPETGKAFKGLNQIGDYKY

SEQ ID NO: 9792 - protein, 20 aa, Artificial Sequence
  Description of Artificial Sequence: targeting sequence/synthetic sequence
SDISHVLETETIFTPSSVKK

SEQ ID NO: 9793 - protein, 20 aa, Artificial Sequence
  Description of Artificial Sequence: targeting sequence/synthetic sequence
VETPPAENKPRKRQLSEEQP

SEQ ID NO: 9794 - protein, 20 aa, Artificial Sequence
  Description of Artificial Sequence: targeting sequence/synthetic sequence
QQNISPLVRERGPQRVAAHI

SEQ ID NO: 9795 - protein, 20 aa, Artificial Sequence
  Description of Artificial Sequence: targeting sequence/synthetic sequence
IPDKEQAISALPDYASQPGK

SEQ ID NO: 9796 - protein, 20 aa, Artificial Sequence
  Description of Artificial Sequence: targeting sequence/synthetic sequence
ALEKLELTKYADKPAGTYSG

SEQ ID NO: 9797 - protein, 20 aa, Artificial Sequence
  Description of Artificial Sequence: targeting sequence/synthetic sequence
LEKLELTKYADKPAGTYSGG

SEQ ID NO: 9798 - protein, 20 aa, Artificial Sequence
  Description of Artificial Sequence: targeting sequence/synthetic sequence
NTINPEASASPCCVSQDLEP

SEQ ID NO: 9799 - protein, 20 aa, Artificial Sequence
  Description of Artificial Sequence: targeting sequence/synthetic sequence
PTNADIDLKDDLGNTLEKKG

SEQ ID NO: 9800 - protein, 20 aa, Artificial Sequence
  Description of Artificial Sequence: targeting sequence/synthetic sequence
ERDAPIVNKVVTPLSPPTNL

SEQ ID NO: 9801 - protein, 20 aa, Artificial Sequence
  Description of Artificial Sequence: targeting sequence/synthetic sequence
PAQPLGPRAQLLLKATPEDN

SEQ ID NO: 9802 - protein, 20 aa, Artificial Sequence
  Description of Artificial Sequence: targeting sequence/synthetic sequence
KIEDHFIDLPRKKISNFTNK

SEQ ID NO: 9803 - protein, 20 aa, Artificial Sequence
  Description of Artificial Sequence: targeting sequence/synthetic sequence
IINPTNADIDLKDDLGNTLE

SEQ ID NO: 9804 - protein, 20 aa, Artificial Sequence
  Description of Artificial Sequence: targeting sequence/synthetic sequence
WPESPKAQASSVPTAQPQAE

SEQ ID NO: 9805 - protein, 20 aa, Artificial Sequence
  Description of Artificial Sequence: targeting sequence/synthetic sequence
PSSIPDKEQAISALPDYASQ

SEQ ID NO: 9806 - protein, 20 aa, Artificial Sequence
  Description of Artificial Sequence: targeting sequence/synthetic sequence
ILTPTRFLDDLKALDKKLED

SEQ ID NO: 9807 - protein, 20 aa, Artificial Sequence
  Description of Artificial Sequence: targeting sequence/synthetic sequence
QDIQGKMEAAIKKIPTISIE

SEQ ID NO: 9808 - protein, 20 aa, Artificial Sequence
  Description of Artificial Sequence: targeting sequence/synthetic sequence
QNFIFKFNETAPVPTIPPLD

SEQ ID NO: 9809 - protein, 20 aa, Artificial Sequence
  Description of Artificial Sequence: targeting sequence/synthetic sequence
LTPTRFLDDLKALDKKLEDI

SEQ ID NO: 9810 - protein, 20 aa, Artificial Sequence
  Description of Artificial Sequence: targeting sequence/synthetic sequence
TAPPAPPSPSPSPVPKSPSV

SEQ ID NO: 9811 - protein, 20 aa, Artificial Sequence
  Description of Artificial Sequence: targeting sequence/synthetic sequence
SPKAQASSVPTAQPQAEGSL

SEQ ID NO: 9812 - protein, 20 aa, Artificial Sequence
  Description of Artificial Sequence: targeting sequence/synthetic sequence
NQFQSDPPAPSDKSVKIEER

SEQ ID NO: 9813 - protein, 20 aa, Artificial Sequence
  Description of Artificial Sequence: targeting sequence/synthetic sequence
HKDSLLIEEYSVTQTTLDQV

SEQ ID NO: 9814 - protein, 20 aa, Artificial Sequence
  Description of Artificial Sequence: targeting sequence/synthetic sequence
KQGNLERECIEELCNKEEAR

SEQ ID NO: 9815 - protein, 20 aa, Artificial Sequence
  Description of Artificial Sequence: targeting sequence/synthetic sequence
KFNETAPVPTIPPLDTKIDL

SEQ ID NO: 9816 - protein, 20 aa, Artificial Sequence
  Description of Artificial Sequence: targeting sequence/synthetic sequence
TANLEAQALWKEPGSNVTMS

SEQ ID NO: 9817 - protein, 20 aa, Artificial Sequence
  Description of Artificial Sequence: targeting sequence/synthetic sequence
NDGAPGKNGERGGPGGPGPQ

SEQ ID NO: 9818 - protein, 20 aa, Artificial Sequence
  Description of Artificial Sequence: targeting sequence/synthetic sequence
PGADGVAGPKGPAGERGSPG

SEQ ID NO: 9819 - protein, 20 aa, Artificial Sequence
  Description of Artificial Sequence: targeting sequence/synthetic sequence
RFQEEIKENTKNDKQMVQYI

SEQ ID NO: 9820 - protein, 20 aa, Artificial Sequence
  Description of Artificial Sequence: targeting sequence/synthetic sequence
FPQEEFDDKQFQKAQAISVL

SEQ ID NO: 9821 - protein, 20 aa, Artificial Sequence
  Description of Artificial Sequence: targeting sequence/synthetic sequence
RAHQQKKHSGFEDELSEVLE

SEQ ID NO: 9822 - protein, 20 aa, Artificial Sequence
  Description of Artificial Sequence: targeting sequence/synthetic sequence
QELLSNLGHPESPPRKRLKS

SEQ ID NO: 9823 - protein, 20 aa, Artificial Sequence
  Description of Artificial Sequence: targeting sequence/synthetic sequence
AHAKQIIKPFILRRVKEEVL

SEQ ID NO: 9824 - protein, 20 aa, Artificial Sequence
  Description of Artificial Sequence: targeting sequence/synthetic sequence
NGVPAQPLGPRAQLLLKATP

SEQ ID NO: 9825 - protein, 20 aa, Artificial Sequence
  Description of Artificial Sequence: targeting sequence/synthetic sequence
LRPKTGVRGLHKSLTDVALE

SEQ ID NO: 9826 - protein, 20 aa, Artificial Sequence
  Description of Artificial Sequence: targeting sequence/synthetic sequence
SVTQSQGSSSQSQGISSSST

SEQ ID NO: 9827 - protein, 20 aa, Artificial Sequence
  Description of Artificial Sequence: targeting sequence/synthetic sequence
EKSEDEPPLTLPKPSLIPQE

SEQ ID NO: 9828 - protein, 20 aa, Artificial Sequence
  Description of Artificial Sequence: targeting sequence/synthetic sequence
KSEDEPPLTLPKPSLIPQEV

SEQ ID NO: 9829 - protein, 20 aa, Artificial Sequence
  Description of Artificial Sequence: targeting sequence/synthetic sequence
MYSALTRDPFSVIEESLPGG

SEQ ID NO: 9830 - protein, 20 aa, Artificial Sequence
  Description of Artificial Sequence: targeting sequence/synthetic sequence
DGSPGKDGVRGLTGPIGPPG

SEQ ID NO: 9831 - protein, 20 aa, Artificial Sequence
  Description of Artificial Sequence: targeting sequence/synthetic sequence
SLFGDETLQKYQSSNAQRSS

SEQ ID NO: 9832 - protein, 20 aa, Artificial Sequence
  Description of Artificial Sequence: targeting sequence/synthetic sequence
KLEKSEDEPPLTLPKPSLIP

SEQ ID NO: 9833 - protein, 20 aa, Artificial Sequence
  Description of Artificial Sequence: targeting sequence/synthetic sequence
ELQAAAAELRSLPGLPPATA

SEQ ID NO: 9834 - protein, 20 aa, Artificial Sequence
  Description of Artificial Sequence: targeting sequence/synthetic sequence
SKVTESASVMPSQDVSGSED

SEQ ID NO: 9835 - protein, 20 aa, Artificial Sequence
  Description of Artificial Sequence: targeting sequence/synthetic sequence
DSPSINLDVRKQYKRDIQNI

SEQ ID NO: 9836 - protein, 20 aa, Artificial Sequence
  Description of Artificial Sequence: targeting sequence/synthetic sequence
PSVPIESQPPPSTLPPFLAP

SEQ ID NO: 9837 - protein, 20 aa, Artificial Sequence
  Description of Artificial Sequence: targeting sequence/synthetic sequence
DAPIVNKVVTPLSPPTNLHL

SEQ ID NO: 9838 - protein, 20 aa, Artificial Sequence
  Description of Artificial Sequence: targeting sequence/synthetic sequence
PGSASDLETSGLQEQRNHLQ

SEQ ID NO: 9839 - protein, 20 aa, Artificial Sequence
  Description of Artificial Sequence: targeting sequence/synthetic sequence
FKFNETAPVPTIPPLDTKID

SEQ ID NO: 9840 - protein, 20 aa, Artificial Sequence
  Description of Artificial Sequence: targeting sequence/synthetic sequence
EDFQPAAASETNWESVTSSI

SEQ ID NO: 9841 - protein, 20 aa, Artificial Sequence
  Description of Artificial Sequence: targeting sequence/synthetic sequence
LSQALPAPPGALPLAPSSTA

SEQ ID NO: 9842 - protein, 20 aa, Artificial Sequence
  Description of Artificial Sequence: targeting sequence/synthetic sequence
QDTAKSPHRTKFTLSLDVPT

SEQ ID NO: 9843 - protein, 20 aa, Artificial Sequence
  Description of Artificial Sequence: targeting sequence/synthetic sequence
TAGVPGFVLDTNASVSNGAT

SEQ ID NO: 9844 - protein, 20 aa, Artificial Sequence
  Description of Artificial Sequence: targeting sequence/synthetic sequence
AVGPAGKDGEAGAQGPPGPA

SEQ ID NO: 9845 - protein, 20 aa, Artificial Sequence
  Description of Artificial Sequence: targeting sequence/synthetic sequence
SYYMTSSQLSTPLQQWRQGE

SEQ ID NO: 9846 - protein, 20 aa, Artificial Sequence
  Description of Artificial Sequence: targeting sequence/synthetic sequence
PKTGVRGLHKSLTDVALEHH

SEQ ID NO: 9847 - protein, 20 aa, Artificial Sequence
  Description of Artificial Sequence: targeting sequence/synthetic sequence
MTSSQLSTPLQQWRQGEYKC

SEQ ID NO: 9848 - protein, 20 aa, Artificial Sequence
  Description of Artificial Sequence: targeting sequence/synthetic sequence
AKGDAGPPGPAGPAGPPGPI

SEQ ID NO: 9849 - protein, 20 aa, Artificial Sequence
  Description of Artificial Sequence: targeting sequence/synthetic sequence
VVIDSSKHSDDSVAMKHFKS

SEQ ID NO: 9850 - protein, 20 aa, Artificial Sequence
  Description of Artificial Sequence: targeting sequence/synthetic sequence
KKFDGPCDPCQGALPDPSRS

SEQ ID NO: 9851 - protein, 20 aa, Artificial Sequence
  Description of Artificial Sequence: targeting sequence/synthetic sequence
RQADEEMTGYVATRWYRAPE

SEQ ID NO: 9852 - protein, 20 aa, Artificial Sequence
  Description of Artificial Sequence: targeting sequence/synthetic sequence
EVDGKVESIMKRTALVANTS

SEQ ID NO: 9853 - protein, 20 aa, Artificial Sequence
  Description of Artificial Sequence: targeting sequence/synthetic sequence
DNNTDKSIDFSISLVSKNQV

SEQ ID NO: 9854 - protein, 20 aa, Artificial Sequence
  Description of Artificial Sequence: targeting sequence/synthetic sequence
VIDSSKHSDDSVAMKHFKSP

SEQ ID NO: 9855 - protein, 20 aa, Artificial Sequence
  Description of Artificial Sequence: targeting sequence/synthetic sequence
RSAEGSNPPKPLKKLRFDIE

SEQ ID NO: 9856 - protein, 20 aa, Artificial Sequence
  Description of Artificial Sequence: targeting sequence/synthetic sequence
FEETYIPKDQKYSFLHDSQT

SEQ ID NO: 9857 - protein, 20 aa, Artificial Sequence
  Description of Artificial Sequence: targeting sequence/synthetic sequence
VDNAETIKKELGLSLTEPLM

SEQ ID NO: 9858 - protein, 20 aa, Artificial Sequence
  Description of Artificial Sequence: targeting sequence/synthetic sequence
PQNVDSVCSGTLQKTEDVHL

SEQ ID NO: 9859 - protein, 20 aa, Artificial Sequence
  Description of Artificial Sequence: targeting sequence/synthetic sequence
PSPTTAPPAPPSPSPSPVPK

SEQ ID NO: 9860 - protein, 20 aa, Artificial Sequence
  Description of Artificial Sequence: targeting sequence/synthetic sequence
EMHYFSPETGKAFKGLNQIG

SEQ ID NO: 9861 - protein, 20 aa, Artificial Sequence
  Description of Artificial Sequence: targeting sequence/synthetic sequence
GKVTNEGTTSTLTMNPVSFG

SEQ ID NO: 9862 - protein, 20 aa, Artificial Sequence
  Description of Artificial Sequence: targeting sequence/synthetic sequence
EFPQEEFDDKQFQKAQAISV

SEQ ID NO: 9863 - protein, 20 aa, Artificial Sequence
  Description of Artificial Sequence: targeting sequence/synthetic sequence
LDGEMHYFSPETGKAFKGLN

SEQ ID NO: 9864 - protein, 20 aa, Artificial Sequence
  Description of Artificial Sequence: targeting sequence/synthetic sequence
SMDPGSTPPSCCVPTKLTPI

SEQ ID NO: 9865 - protein, 20 aa, Artificial Sequence
  Description of Artificial Sequence: targeting sequence/synthetic sequence
EAQTTQPTATEAQTTPLAAM

SEQ ID NO: 9866 - protein, 20 aa, Artificial Sequence
  Description of Artificial Sequence: targeting sequence/synthetic sequence
HAFESSQKYKEGKFIIDLAH

SEQ ID NO: 9867 - protein, 20 aa, Artificial Sequence
  Description of Artificial Sequence: targeting sequence/synthetic sequence
SLLIEEYSVTQTTLDQVFVN

SEQ ID NO: 9868 - protein, 20 aa, Artificial Sequence
  Description of Artificial Sequence: targeting sequence/synthetic sequence
GLLLSQALPAPPGALPLAPS

SEQ ID NO: 9869 - protein, 20 aa, Artificial Sequence
  Description of Artificial Sequence: targeting sequence/synthetic sequence
TSLEPLQESPRPTGVWKSRE

SEQ ID NO: 9870 - protein, 20 aa, Artificial Sequence
  Description of Artificial Sequence: targeting sequence/synthetic sequence
SEDMLGRVFNGSGKPIDKGP

SEQ ID NO: 9871 - protein, 20 aa, Artificial Sequence
  Description of Artificial Sequence: targeting sequence/synthetic sequence
GPCDPCQGALPDPSRSCRVN

SEQ ID NO: 9872 - protein, 20 aa, Artificial Sequence
  Description of Artificial Sequence: targeting sequence/synthetic sequence
TAPVPTIPPLDTKIDLQSDP

SEQ ID NO: 9873 - protein, 20 aa, Artificial Sequence
  Description of Artificial Sequence: targeting sequence/synthetic sequence
GADGVAGPKGPAGERGSPGP

SEQ ID NO: 9874 - protein, 20 aa, Artificial Sequence
  Description of Artificial Sequence: targeting sequence/synthetic sequence
QPQNVDSVCSGTLQKTEDVH

SEQ ID NO: 9875 - protein, 20 aa, Artificial Sequence
  Description of Artificial Sequence: targeting sequence/synthetic sequence
PGPVGVQGPPGPAGEEGKRG

SEQ ID NO: 9876 - protein, 20 aa, Artificial Sequence
  Description of Artificial Sequence: targeting sequence/synthetic sequence
NGNGDPNNMDKAIKLYKKLK

SEQ ID NO: 9877 - protein, 20 aa, Artificial Sequence
  Description of Artificial Sequence: targeting sequence/synthetic sequence
NKKTRIIPRHLQLAIRNDEE

SEQ ID NO: 9878 - protein, 20 aa, Artificial Sequence
  Description of Artificial Sequence: targeting sequence/synthetic sequence
PPGRDGIPGQPGLPGPPGPP

SEQ ID NO: 9879 - protein, 20 aa, Artificial Sequence
  Description of Artificial Sequence: targeting sequence/synthetic sequence
NGNGDPNNMDRAVKLYRKLK

SEQ ID NO: 9880 - protein, 20 aa, Artificial Sequence
  Description of Artificial Sequence: targeting sequence/synthetic sequence
LEPLQESPRPTGVWKSREVA

SEQ ID NO: 9881 - protein, 20 aa, Artificial Sequence
  Description of Artificial Sequence: targeting sequence/synthetic sequence
DKSIDFSISLVSKNQVKVNG

SEQ ID NO: 9882 - protein, 20 aa, Artificial Sequence
  Description of Artificial Sequence: targeting sequence/synthetic sequence
VPPAPAASAAPEKPLAGKKA

SEQ ID NO: 9883 - protein, 20 aa, Artificial Sequence
  Description of Artificial Sequence: targeting sequence/synthetic sequence
PISDSEELSAKKRKKSSSEA

SEQ ID NO: 9884 - protein, 20 aa, Artificial Sequence
  Description of Artificial Sequence: targeting sequence/synthetic sequence
EAFDATISIKSYPDKKFSYS

SEQ ID NO: 9885 - protein, 20 aa, Artificial Sequence
  Description of Artificial Sequence: targeting sequence/synthetic sequence
LAALKKALAAAGYDVEKNNS

SEQ ID NO: 9886 - protein, 20 aa, Artificial Sequence
  Description of Artificial Sequence: targeting sequence/synthetic sequence
ELLSNLGHPESPPRKRLKSK

SEQ ID NO: 9887 - protein, 20 aa, Artificial Sequence
  Description of Artificial Sequence: targeting sequence/synthetic sequence
LSNLGHPESPPRKRLKSKGS

SEQ ID NO: 9888 - protein, 20 aa, Artificial Sequence
  Description of Artificial Sequence: targeting sequence/synthetic sequence
LKRRNVPHEDICEDSDIDGD

SEQ ID NO: 9889 - protein, 20 aa, Artificial Sequence
  Description of Artificial Sequence: targeting sequence/synthetic sequence
LLLSQALPAPPGALPLAPSS

SEQ ID NO: 9890 - protein, 20 aa, Artificial Sequence
  Description of Artificial Sequence: targeting sequence/synthetic sequence
RQKRSLTTSPVDISIIDSVN

SEQ ID NO: 9891 - protein, 20 aa, Artificial Sequence
  Description of Artificial Sequence: targeting sequence/synthetic sequence
NGKVTNEGTTSTLTMNPVSF

SEQ ID NO: 9892 - protein, 20 aa, Artificial Sequence
  Description of Artificial Sequence: targeting sequence/synthetic sequence
DRHDFGLPQEEFDGNQFQKT

SEQ ID NO: 9893 - protein, 20 aa, Artificial Sequence
  Description of Artificial Sequence: targeting sequence/synthetic sequence
YPDPGAAAAAPPAARVPDTL

SEQ ID NO: 9894 - protein, 20 aa, Artificial Sequence
  Description of Artificial Sequence: targeting sequence/synthetic sequence
LRDNIQGITKPAIRRLARRG

SEQ ID NO: 9895 - protein, 20 aa, Artificial Sequence
  Description of Artificial Sequence: targeting sequence/synthetic sequence
PWSPRPLEATAPTAPQPPLL

SEQ ID NO: 9896 - protein, 20 aa, Artificial Sequence
  Description of Artificial Sequence: targeting sequence/synthetic sequence
GAASITLTVQARRLLSGIVQ

SEQ ID NO: 9897 - protein, 20 aa, Artificial Sequence
  Description of Artificial Sequence: targeting sequence/synthetic sequence
PLQESPRPTGVWKSREVATE

SEQ ID NO: 9898 - protein, 20 aa, Artificial Sequence
  Description of Artificial Sequence: targeting sequence/synthetic sequence
SLVALKKALAAAGYDVEKNN

SEQ ID NO: 9899 - protein, 20 aa, Artificial Sequence
  Description of Artificial Sequence: targeting sequence/synthetic sequence
YNISVTDPSGKSLLLDPPTN

SEQ ID NO: 9900 - protein, 20 aa, Artificial Sequence
  Description of Artificial Sequence: targeting sequence/synthetic sequence
EHLLKRRNVPHEDICEDSDI

SEQ ID NO: 9901 - protein, 20 aa, Artificial Sequence
  Description of Artificial Sequence: targeting sequence/synthetic sequence
MNSMDPGSTPPSCCVPTKLT

SEQ ID NO: 9902 - protein, 20 aa, Artificial Sequence
  Description of Artificial Sequence: targeting sequence/synthetic sequence
INLDVRKQYKRDIQNIDALL

SEQ ID NO: 9903 - protein, 20 aa, Artificial Sequence
  Description of Artificial Sequence: targeting sequence/synthetic sequence
ADGSPGKDGVRGLTGPIGPP

SEQ ID NO: 9904 - protein, 20 aa, Artificial Sequence
  Description of Artificial Sequence: targeting sequence/synthetic sequence
MAEGIDIGEMPSYDLVLSKP

SEQ ID NO: 9905 - protein, 20 aa, Artificial Sequence
  Description of Artificial Sequence: targeting sequence/synthetic sequence
DFQPAAASETNWESVTSSIS

SEQ ID NO: 9906 - protein, 20 aa, Artificial Sequence
  Description of Artificial Sequence: targeting sequence/synthetic sequence
HVKEKEKNKDENKRKDEERN

SEQ ID NO: 9907 - protein, 20 aa, Artificial Sequence
  Description of Artificial Sequence: targeting sequence/synthetic sequence
GDSDGKHETVNQEEKSGPGA

SEQ ID NO: 9908 - protein, 20 aa, Artificial Sequence
  Description of Artificial Sequence: targeting sequence/synthetic sequence
AEGIDIGEMPSYDLVLSKPS

SEQ ID NO: 9909 - protein, 20 aa, Artificial Sequence
  Description of Artificial Sequence: targeting sequence/synthetic sequence
PATDHVIRRETETTFSGSHS

SEQ ID NO: 9910 - protein, 20 aa, Artificial Sequence
  Description of Artificial Sequence: targeting sequence/synthetic sequence
SKSAPAPKKGSKKAVTKAQK

SEQ ID NO: 9911 - protein, 20 aa, Artificial Sequence
  Description of Artificial Sequence: targeting sequence/synthetic sequence
EETKQGNLERECIEELCNKE

SEQ ID NO: 9912 - protein, 20 aa, Artificial Sequence
  Description of Artificial Sequence: targeting sequence/synthetic sequence
TVPPAPAASAAPEKPLAGKK

SEQ ID NO: 9913 - protein, 20 aa, Artificial Sequence
  Description of Artificial Sequence: targeting sequence/synthetic sequence
MEVDGKVESIMKRTALVANT

SEQ ID NO: 9914 - protein, 20 aa, Artificial Sequence
  Description of Artificial Sequence: targeting sequence/synthetic sequence
FLVVFEDVKGTGGESRDLPS

SEQ ID NO: 9915 - protein, 20 aa, Artificial Sequence
  Description of Artificial Sequence: targeting sequence/synthetic sequence
QGVVDRGWGNGCGLFGKGSI

SEQ ID NO: 9916 - protein, 20 aa, Artificial Sequence
  Description of Artificial Sequence: targeting sequence/synthetic sequence
PSQDVTVPCPVPPPPPCCHP

SEQ ID NO: 9917 - protein, 20 aa, Artificial Sequence
  Description of Artificial Sequence: targeting sequence/synthetic sequence
DRGEPGPPGPAGFAGPPGAD

SEQ ID NO: 9918 - protein, 20 aa, Artificial Sequence
  Description of Artificial Sequence: targeting sequence/synthetic sequence
EFEETYIPKDQKYSFLHDSQ

SEQ ID NO: 9919 - protein, 20 aa, Artificial Sequence
  Description of Artificial Sequence: targeting sequence/synthetic sequence
TYFRFQEEIKENTKNDKQMV

SEQ ID NO: 9920 - protein, 20 aa, Artificial Sequence
  Description of Artificial Sequence: targeting sequence/synthetic sequence
QGDQLSTHTDGIPHLVLSPS

SEQ ID NO: 9921 - protein, 20 aa, Artificial Sequence
  Description of Artificial Sequence: targeting sequence/synthetic sequence
GDETLQKYQSSNAQRSSEFK

SEQ ID NO: 9922 - protein, 20 aa, Artificial Sequence
  Description of Artificial Sequence: targeting sequence/synthetic sequence
GAAAAAPPAARVPDTLMQSL

SEQ ID NO: 9923 - protein, 20 aa, Artificial Sequence
  Description of Artificial Sequence: targeting sequence/synthetic sequence
YEHAFESSQKYKEGKFIIDL

SEQ ID NO: 9924 - protein, 20 aa, Artificial Sequence
  Description of Artificial Sequence: targeting sequence/synthetic sequence
KDGSVTLPTQPVQEFLLSGH

SEQ ID NO: 9925 - protein, 20 aa, Artificial Sequence
  Description of Artificial Sequence: targeting sequence/synthetic sequence
LAPGPLGRGTMPGKFPHSDK

SEQ ID NO: 9926 - protein, 20 aa, Artificial Sequence
  Description of Artificial Sequence: targeting sequence/synthetic sequence
DQFLVVFEDVKGTGGESRDL

SEQ ID NO: 9927 - protein, 20 aa, Artificial Sequence
  Description of Artificial Sequence: targeting sequence/synthetic sequence
YQDIAWFDEKENSTGGLTTI

SEQ ID NO: 9928 - protein, 20 aa, Artificial Sequence
  Description of Artificial Sequence: targeting sequence/synthetic sequence
TPVSEDMLGRVFNGSGKPID

SEQ ID NO: 9929 - protein, 20 aa, Artificial Sequence
  Description of Artificial Sequence: targeting sequence/synthetic sequence
NLAPGPLGRGTMPGKFPHSD

SEQ ID NO: 9930 - protein, 20 aa, Artificial Sequence
  Description of Artificial Sequence: targeting sequence/synthetic sequence
PTPGDPMLASWPTGEVWLST

SEQ ID NO: 9931 - protein, 20 aa, Artificial Sequence
  Description of Artificial Sequence: targeting sequence/synthetic sequence
QDVDSVCSGTLQKTEDVHLM

SEQ ID NO: 9932 - protein, 20 aa, Artificial Sequence
  Description of Artificial Sequence: targeting sequence/synthetic sequence
SPTRNPEVRTPKSATQPQTT

SEQ ID NO: 9933 - protein, 20 aa, Artificial Sequence
  Description of Artificial Sequence: targeting sequence/synthetic sequence
AELQAAAAELRSLPGLPPAT

SEQ ID NO: 9934 - protein, 20 aa, Artificial Sequence
  Description of Artificial Sequence: targeting sequence/synthetic sequence
YTEAFDATISIKSYPDKKFS

SEQ ID NO: 9935 - protein, 20 aa, Artificial Sequence
  Description of Artificial Sequence: targeting sequence/synthetic sequence
HQQKKHSGFEDELSEVLENQ

SEQ ID NO: 9936 - protein, 20 aa, Artificial Sequence
  Description of Artificial Sequence: targeting sequence/synthetic sequence
TKRSGQVLEVSGSKAVVQVF

SEQ ID NO: 9937 - protein, 20 aa, Artificial Sequence
  Description of Artificial Sequence: targeting sequence/synthetic sequence
SKHSDDSVAMKHFKSPTKES

SEQ ID NO: 9938 - protein, 20 aa, Artificial Sequence
  Description of Artificial Sequence: targeting sequence/synthetic sequence
PSLFVTKEGTNDGWKNAAHI

SEQ ID NO: 9939 - protein, 20 aa, Artificial Sequence
  Description of Artificial Sequence: targeting sequence/synthetic sequence
SPSSCLMDRHDFGFPQEEFD

SEQ ID NO: 9940 - protein, 20 aa, Artificial Sequence
  Description of Artificial Sequence: targeting sequence/synthetic sequence
GSPGSASDLETSGLQEQRNH

SEQ ID NO: 9941 - protein, 20 aa, Artificial Sequence
  Description of Artificial Sequence: targeting sequence/synthetic sequence
KLDAWEQIRLKPGSKKKYRL

SEQ ID NO: 9942 - protein, 20 aa, Artificial Sequence
  Description of Artificial Sequence: targeting sequence/synthetic sequence
DTTSQEPPDTTSPEPPDKTS

SEQ ID NO: 9943 - protein, 20 aa, Artificial Sequence
  Description of Artificial Sequence: targeting sequence/synthetic sequence
VSLAALKKALAAAGYDVEKN

SEQ ID NO: 9944 - protein, 20 aa, Artificial Sequence
  Description of Artificial Sequence: targeting sequence/synthetic sequence
IPGFSLFGDETLQQYQSSNT

SEQ ID NO: 9945 - protein, 20 aa, Artificial Sequence
  Description of Artificial Sequence: targeting sequence/synthetic sequence
DMLGRVFNGSGKPIDRGPVV

SEQ ID NO: 9946 - protein, 20 aa, Artificial Sequence
  Description of Artificial Sequence: targeting sequence/synthetic sequence
VVPHEYMLSIYRTYSIAEKL

SEQ ID NO: 9947 - protein, 20 aa, Artificial Sequence
  Description of Artificial Sequence: targeting sequence/synthetic sequence
KEYLMYSALTRDPFSVIEES

SEQ ID NO: 9948 - protein, 20 aa, Artificial Sequence
  Description of Artificial Sequence: targeting sequence/synthetic sequence
TVARARESGKAIIITSHSME

SEQ ID NO: 9949 - protein, 20 aa, Artificial Sequence
  Description of Artificial Sequence: targeting sequence/synthetic sequence
LTGSKLDAWEQIRLKPGSKK

SEQ ID NO: 9950 - protein, 20 aa, Artificial Sequence
  Description of Artificial Sequence: targeting sequence/synthetic sequence
DTAKSPHRTKFTLSLDVPTN

SEQ ID NO: 9951 - protein, 20 aa, Artificial Sequence
  Description of Artificial Sequence: targeting sequence/synthetic sequence
EVETYVLSIVPSGPLKAQIA

SEQ ID NO: 9952 - protein, 20 aa, Artificial Sequence
  Description of Artificial Sequence: targeting sequence/synthetic sequence
VVERQKRSLTTSPVDISIID

SEQ ID NO: 9953 - protein, 20 aa, Artificial Sequence
  Description of Artificial Sequence: targeting sequence/synthetic sequence
KRSGQVLEVSGSKAVVQVFE

SEQ ID NO: 9954 - protein, 20 aa, Artificial Sequence
  Description of Artificial Sequence: targeting sequence/synthetic sequence
SLSATDIEVFWASPLEKNRG

SEQ ID NO: 9955 - protein, 20 aa, Artificial Sequence
  Description of Artificial Sequence: targeting sequence/synthetic sequence
DTVARARESGKAIIITSHSM

SEQ ID NO: 9956 - protein, 20 aa, Artificial Sequence
  Description of Artificial Sequence: targeting sequence/synthetic sequence
GPIPPVLPVPPGFPPGPQIP

SEQ ID NO: 9957 - protein, 20 aa, Artificial Sequence
  Description of Artificial Sequence: targeting sequence/synthetic sequence
QGPPERDLCGCYSVSSVLPG

SEQ ID NO: 9958 - protein, 20 aa, Artificial Sequence
  Description of Artificial Sequence: targeting sequence/synthetic sequence
GVNKEYLMYSALTRDPFSVI

SEQ ID NO: 9959 - protein, 20 aa, Artificial Sequence
  Description of Artificial Sequence: targeting sequence/synthetic sequence
LKVKRITPRHLQLAIRGDEE

SEQ ID NO: 9960 - protein, 20 aa, Artificial Sequence
  Description of Artificial Sequence: targeting sequence/synthetic sequence
DHLEKLFKMDEASAQLLAYK

SEQ ID NO: 9961 - protein, 20 aa, Artificial Sequence
  Description of Artificial Sequence: targeting sequence/synthetic sequence
KDSLLIEEYSVTQTTLDQVF

SEQ ID NO: 9962 - protein, 20 aa, Artificial Sequence
  Description of Artificial Sequence: targeting sequence/synthetic sequence
TYQEFEETYIPKDQKYSFLH

SEQ ID NO: 9963 - protein, 20 aa, Artificial Sequence
  Description of Artificial Sequence: targeting sequence/synthetic sequence
SPTPGDPMLASWPTGEVWLS

SEQ ID NO: 9964 - protein, 20 aa, Artificial Sequence
  Description of Artificial Sequence: targeting sequence/synthetic sequence
FGSSDHLEKLFKMDEASAQL

SEQ ID NO: 9965 - protein, 20 aa, Artificial Sequence
  Description of Artificial Sequence: targeting sequence/synthetic sequence
ANLIIFGPGPVLNENETIDI

SEQ ID NO: 9966 - protein, 20 aa, Artificial Sequence
  Description of Artificial Sequence: targeting sequence/synthetic sequence
QKSTELLIRKLPFQRLVREI

SEQ ID NO: 9967 - protein, 20 aa, Artificial Sequence
  Description of Artificial Sequence: targeting sequence/synthetic sequence
SAPRSPAPREGPPPVLASPA

SEQ ID NO: 9968 - protein, 20 aa, Artificial Sequence
  Description of Artificial Sequence: targeting sequence/synthetic sequence
PPGFTGPPGPPGPPGPPGEK

SEQ ID NO: 9969 - protein, 20 aa, Artificial Sequence
  Description of Artificial Sequence: targeting sequence/synthetic sequence
RNPEVRTPKSATQPQTTETN

SEQ ID NO: 9970 - protein, 20 aa, Artificial Sequence
  Description of Artificial Sequence: targeting sequence/synthetic sequence
DSLLIEEYSVTQTTLDQVFV

SEQ ID NO: 9971 - protein, 20 aa, Artificial Sequence
  Description of Artificial Sequence: targeting sequence/synthetic sequence
GELDKWEKIRLRPGGKKQYR

SEQ ID NO: 9972 - protein, 20 aa, Artificial Sequence
  Description of Artificial Sequence: targeting sequence/synthetic sequence
GQPGLPGPPGPPGPPGPPGL

SEQ ID NO: 9973 - protein, 20 aa, Artificial Sequence
  Description of Artificial Sequence: targeting sequence/synthetic sequence
GSPGKDGVRGLTGPIGPPGP

SEQ ID NO: 9974 - protein, 20 aa, Artificial Sequence
  Description of Artificial Sequence: targeting sequence/synthetic sequence
VGMHVKEKEKNKDENKRKDE

SEQ ID NO: 9975 - protein, 20 aa, Artificial Sequence
  Description of Artificial Sequence: targeting sequence/synthetic sequence
PVGPPGFTGPPGPPGPPGPP

SEQ ID NO: 9976 - protein, 20 aa, Artificial Sequence
  Description of Artificial Sequence: targeting sequence/synthetic sequence
QNNNWLKKFTEMTNACKGME

SEQ ID NO: 9977 - protein, 20 aa, Artificial Sequence
  Description of Artificial Sequence: targeting sequence/synthetic sequence
DAALRAGSRGLSDPWADSVG

SEQ ID NO: 9978 - protein, 20 aa, Artificial Sequence
  Description of Artificial Sequence: targeting sequence/synthetic sequence
SFPSPTRNPEVRTPKSATQP

SEQ ID NO: 9979 - protein, 20 aa, Artificial Sequence
  Description of Artificial Sequence: targeting sequence/synthetic sequence
VERQKRSLTTSPVDISIIDS

SEQ ID NO: 9980 - protein, 20 aa, Artificial Sequence
  Description of Artificial Sequence: targeting sequence/synthetic sequence
RGSLGDSDGKHETVNQEEKS

SEQ ID NO: 9981 - protein, 20 aa, Artificial Sequence
  Description of Artificial Sequence: targeting sequence/synthetic sequence
YAERVGAGAPVYLAAVLEYL

SEQ ID NO: 9982 - protein, 20 aa, Artificial Sequence
  Description of Artificial Sequence: targeting sequence/synthetic sequence
GPPGFTGPPGPPGPPGPPGE

SEQ ID NO: 9983 - protein, 20 aa, Artificial Sequence
  Description of Artificial Sequence: targeting sequence/synthetic sequence
LYEMLSDHSIRSFDDLQRLL

SEQ ID NO: 9984 - protein, 20 aa, Artificial Sequence
  Description of Artificial Sequence: targeting sequence/synthetic sequence
EWKELTYQEVLSFKPPEPPK

SEQ ID NO: 9985 - protein, 20 aa, Artificial Sequence
  Description of Artificial Sequence: targeting sequence/synthetic sequence
LGPIPPVLPVPPGFPPGPQI

SEQ ID NO: 9986 - protein, 20 aa, Artificial Sequence
  Description of Artificial Sequence: targeting sequence/synthetic sequence
GFSLFGDETLQKYQSSNAQR

SEQ ID NO: 9987 - protein, 20 aa, Artificial Sequence
  Description of Artificial Sequence: targeting sequence/synthetic sequence
SETVPPAPAASAAPEKPLAG

SEQ ID NO: 9988 - protein, 20 aa, Artificial Sequence
  Description of Artificial Sequence: targeting sequence/synthetic sequence
ITPHEYMLSLYRTLSDADRK

SEQ ID NO: 9989 - protein, 20 aa, Artificial Sequence
  Description of Artificial Sequence: targeting sequence/synthetic sequence
EPAKSAPAPKKGSKKAVTKA

SEQ ID NO: 9990 - protein, 20 aa, Artificial Sequence
  Description of Artificial Sequence: targeting sequence/synthetic sequence
NDSWLKKFTEMTNACKRMEW

SEQ ID NO: 9991 - protein, 20 aa, Artificial Sequence
  Description of Artificial Sequence: targeting sequence/synthetic sequence
EELLRWSTVPVPPLEPARPN

SEQ ID NO: 9992 - protein, 20 aa, Artificial Sequence
  Description of Artificial Sequence: targeting sequence/synthetic sequence
TVVVAFRELVEPRKQDADSL

SEQ ID NO: 9993 - protein, 20 aa, Artificial Sequence
  Description of Artificial Sequence: targeting sequence/synthetic sequence
VLRDNIQGITKPAIRRLARR

SEQ ID NO: 9994 - protein, 20 aa, Artificial Sequence
  Description of Artificial Sequence: targeting sequence/synthetic sequence
VTVPCPVPPPPPCCHPRLSL

SEQ ID NO: 9995 - protein, 20 aa, Artificial Sequence
  Description of Artificial Sequence: targeting sequence/synthetic sequence
QPPPPPPGSPGGSQDTCTSC

SEQ ID NO: 9996 - protein, 20 aa, Artificial Sequence
  Description of Artificial Sequence: targeting sequence/synthetic sequence
SFLTEVETYVLSIIPSGPLK

SEQ ID NO: 9997 - protein, 20 aa, Artificial Sequence
  Description of Artificial Sequence: targeting sequence/synthetic sequence
SVPIESQPPPSTLPPFLAPE

SEQ ID NO: 9998 - protein, 20 aa, Artificial Sequence
  Description of Artificial Sequence: targeting sequence/synthetic sequence
FVCQCPEGFAGKCCEIDTRA

SEQ ID NO: 9999 - protein, 20 aa, Artificial Sequence
  Description of Artificial Sequence: targeting sequence/synthetic sequence
PEPSTAPSTSFLLPMGPSPP

SEQ ID NO: 10000 - protein, 20 aa, Artificial Sequence
  Description of Artificial Sequence: targeting sequence/synthetic sequence
PGFSLFGDETLQQYQSSNTQ

SEQ ID NO: 10001 - protein, 20 aa, Artificial Sequence
  Description of Artificial Sequence: targeting sequence/synthetic sequence
QGPPDRDLCGCYSVSSVLSG

SEQ ID NO: 10002 - protein, 20 aa, Artificial Sequence
  Description of Artificial Sequence: targeting sequence/synthetic sequence
SAQPPTSEAAVNQMEPPLAM

SEQ ID NO: 10003 - protein, 20 aa, Artificial Sequence
  Description of Artificial Sequence: targeting sequence/synthetic sequence
RDQSDRGWGNHCGLFGKGSI

SEQ ID NO: 10004 - protein, 20 aa, Artificial Sequence
  Description of Artificial Sequence: targeting sequence/synthetic sequence
APRSPAPREGPPPVLASPAG

SEQ ID NO: 10005 - protein, 20 aa, Artificial Sequence
  Description of Artificial Sequence: targeting sequence/synthetic sequence
LKDRHEFRFPEEEFDGHQFQ

SEQ ID NO: 10006 - protein, 20 aa, Artificial Sequence
  Description of Artificial Sequence: targeting sequence/synthetic sequence
RSLLGGHYDPGFMATSPPED

SEQ ID NO: 10007 - protein, 20 aa, Artificial Sequence
  Description of Artificial Sequence: targeting sequence/synthetic sequence
MGARSLTLTVQARQLLSGIV

SEQ ID NO: 10008 - protein, 20 aa, Artificial Sequence
  Description of Artificial Sequence: targeting sequence/synthetic sequence
PPTSEAAVNQMEPPLAMAVT

SEQ ID NO: 10009 - protein, 20 aa, Artificial Sequence
  Description of Artificial Sequence: targeting sequence/synthetic sequence
TDIEVFWASPLEKNRGRIQG

SEQ ID NO: 10010 - protein, 20 aa, Artificial Sequence
  Description of Artificial Sequence: targeting sequence/synthetic sequence
QIIKPFILRRVKEEVLKQLP

SEQ ID NO: 10011 - protein, 20 aa, Artificial Sequence
  Description of Artificial Sequence: targeting sequence/synthetic sequence
DLDPSSIPDKEQAISALPDY

SEQ ID NO: 10012 - protein, 20 aa, Artificial Sequence
  Description of Artificial Sequence: targeting sequence/synthetic sequence
GWGNHCGLFGKGSIVTCVKA

SEQ ID NO: 10013 - protein, 20 aa, Artificial Sequence
  Description of Artificial Sequence: targeting sequence/synthetic sequence
MEAQTTQTTAMEAQTTAPEA

SEQ ID NO: 10014 - protein, 20 aa, Artificial Sequence
  Description of Artificial Sequence: targeting sequence/synthetic sequence
WGNHCGLFGKGSIVACVKAA

SEQ ID NO: 10015 - protein, 20 aa, Artificial Sequence
  Description of Artificial Sequence: targeting sequence/synthetic sequence
PPPPPGSPGGSQDTCTSCGG

SEQ ID NO: 10016 - protein, 20 aa, Artificial Sequence
  Description of Artificial Sequence: targeting sequence/synthetic sequence
ATDHVIRRETETTFSGSHSC

SEQ ID NO: 10017 - protein, 20 aa, Artificial Sequence
  Description of Artificial Sequence: targeting sequence/synthetic sequence
PIPPVLPVPPGFPPGPQIPV

SEQ ID NO: 10018 - protein, 20 aa, Artificial Sequence
  Description of Artificial Sequence: targeting sequence/synthetic sequence
PIPRRHTRSAEDDSERDPLN

SEQ ID NO: 10019 - protein, 20 aa, Artificial Sequence
  Description of Artificial Sequence: targeting sequence/synthetic sequence
FSCLKDRHDFGFPQEEFDGN

SEQ ID NO: 10020 - protein, 20 aa, Artificial Sequence
  Description of Artificial Sequence: targeting sequence/synthetic sequence
LSDHSIRSFDDLQRLLHGDP

SEQ ID NO: 10021 - protein, 20 aa, Artificial Sequence
  Description of Artificial Sequence: targeting sequence/synthetic sequence
SDFVCQCPEGFAGKCCEIDT

SEQ ID NO: 10022 - protein, 20 aa, Artificial Sequence
  Description of Artificial Sequence: targeting sequence/synthetic sequence
VTTEAAFGLICATCEQIADS

SEQ ID NO: 10023 - protein, 20 aa, Artificial Sequence
  Description of Artificial Sequence: targeting sequence/synthetic sequence
SIKIQKFIEWLKVKILPEVR

SEQ ID NO: 10024 - protein, 20 aa, Artificial Sequence
  Description of Artificial Sequence: targeting sequence/synthetic sequence
IKIQKFIEWLKVKILPEVRE

SEQ ID NO: 10025 - protein, 20 aa, Artificial Sequence
  Description of Artificial Sequence: targeting sequence/synthetic sequence
PPPPPPGSPGGSQDTCTSCG

SEQ ID NO: 10026 - protein, 20 aa, Artificial Sequence
  Description of Artificial Sequence: targeting sequence/synthetic sequence
PFSQIVVICSAEGEPSAAPT

SEQ ID NO: 10027 - protein, 20 aa, Artificial Sequence
  Description of Artificial Sequence: targeting sequence/synthetic sequence
QLSTHTDGIPHLVLSPSTVF

SEQ ID NO: 10028 - protein, 20 aa, Artificial Sequence
  Description of Artificial Sequence: targeting sequence/synthetic sequence
HTDDEMTGYVATRWYRAPEI

SEQ ID NO: 10029 - protein, 20 aa, Artificial Sequence
  Description of Artificial Sequence: targeting sequence/synthetic sequence
TNLIIFGPGPVLSDNFTDSM

SEQ ID NO: 10030 - protein, 20 aa, Artificial Sequence
  Description of Artificial Sequence: targeting sequence/synthetic sequence
FADKDGSVTLPTQPVQEFLL

SEQ ID NO: 10031 - protein, 20 aa, Artificial Sequence
  Description of Artificial Sequence: targeting sequence/synthetic sequence
IESQPPPSTLPPFLAPEWDL

SEQ ID NO: 10032 - protein, 20 aa, Artificial Sequence
  Description of Artificial Sequence: targeting sequence/synthetic sequence
PPGPTGPGGDKGDTGPPGPQ

SEQ ID NO: 10033 - protein, 20 aa, Artificial Sequence
  Description of Artificial Sequence: targeting sequence/synthetic sequence
STAPSTSFLLPMGPSPPAEG

SEQ ID NO: 10034 - protein, 20 aa, Artificial Sequence
  Description of Artificial Sequence: targeting sequence/synthetic sequence
LLGGHYDPGFMATSPPEDRP

SEQ ID NO: 10035 - protein, 20 aa, Artificial Sequence
  Description of Artificial Sequence: targeting sequence/synthetic sequence
NTPIPRRHTRSAEDDSERDP

SEQ ID NO: 10036 - protein, 20 aa, Artificial Sequence
  Description of Artificial Sequence: targeting sequence/synthetic sequence
QDTSEELLRWSTVPVPPLEP

SEQ ID NO: 10037 - protein, 20 aa, Artificial Sequence
  Description of Artificial Sequence: targeting sequence/synthetic sequence
TRNPEVRTPKSATQPQTTET

SEQ ID NO: 10038 - protein, 20 aa, Artificial Sequence
  Description of Artificial Sequence: targeting sequence/synthetic sequence
KAGPPGPNGPPGPPGPPGPQ

SEQ ID NO: 10039 - protein, 20 aa, Artificial Sequence
  Description of Artificial Sequence: targeting sequence/synthetic sequence
RPLEATAPTAPQPPLLLLLL

SEQ ID NO: 10040 - protein, 20 aa, Artificial Sequence
  Description of Artificial Sequence: targeting sequence/synthetic sequence
TINPEASASPCCVSQDLEPL

SEQ ID NO: 10041 - protein, 20 aa, Artificial Sequence
  Description of Artificial Sequence: targeting sequence/synthetic sequence
SQIVVICSAEGEPSAAPTDV

SEQ ID NO: 10042 - protein, 20 aa, Artificial Sequence
  Description of Artificial Sequence: targeting sequence/synthetic sequence
LHSPTSPEPPDTTSPEPPNT

SEQ ID NO: 10043 - protein, 20 aa, Artificial Sequence
  Description of Artificial Sequence: targeting sequence/synthetic sequence
PNQFQSDPPAPSDKSVKIEE

SEQ ID NO: 10044 - protein, 20 aa, Artificial Sequence
  Description of Artificial Sequence: targeting sequence/synthetic sequence
ETQPGEEALQPRGTEKEPPG

SEQ ID NO: 10045 - protein, 20 aa, Artificial Sequence
  Description of Artificial Sequence: targeting sequence/synthetic sequence
GEEALQPRGTEKEPPGPTTD

SEQ ID NO: 10046 - protein, 20 aa, Artificial Sequence
  Description of Artificial Sequence: targeting sequence/synthetic sequence
TTEAAFGLICATCEQIADSQ

SEQ ID NO: 10047 - protein, 20 aa, Artificial Sequence
  Description of Artificial Sequence: targeting sequence/synthetic sequence
TTEGAFGLVCATCEQIADSQ

SEQ ID NO: 10048 - protein, 20 aa, Artificial Sequence
  Description of Artificial Sequence: targeting sequence/synthetic sequence
LEKELRLKETLKNQGVSNAV

SEQ ID NO: 10049 - protein, 20 aa, Artificial Sequence
  Description of Artificial Sequence: targeting sequence/synthetic sequence
YMKHATKTAKDALSSVQESQ

SEQ ID NO: 10050 - protein, 20 aa, Artificial Sequence
  Description of Artificial Sequence: targeting sequence/synthetic sequence
EAVERAIARVADTISSGPVN

SEQ ID NO: 10051 - protein, 20 aa, Artificial Sequence
  Description of Artificial Sequence: targeting sequence/synthetic sequence
RVADTIGSGPSNSQAVPALT

SEQ ID NO: 10052 - protein, 20 aa, Artificial Sequence
  Description of Artificial Sequence: targeting sequence/synthetic sequence
ASLSKQPTSQPRGDPTGPKE

SEQ ID NO: 10053 - protein, 20 aa, Artificial Sequence
  Description of Artificial Sequence: targeting sequence/synthetic sequence
RVGLEASNNGSMRNTSQDRE

SEQ ID NO: 10054 - protein, 20 aa, Artificial Sequence
  Description of Artificial Sequence: targeting sequence/synthetic sequence
VVSHEDSRTLLNASRSLEVS

SEQ ID NO: 10055 - protein, 20 aa, Artificial Sequence
  Description of Artificial Sequence: targeting sequence/synthetic sequence
QALVREMSGSPASGIPVKVS

SEQ ID NO: 10056 - protein, 20 aa, Artificial Sequence
  Description of Artificial Sequence: targeting sequence/synthetic sequence
DVRGNLRGNTEGLQKSLAEL

SEQ ID NO: 10057 - protein, 20 aa, Artificial Sequence
  Description of Artificial Sequence: targeting sequence/synthetic sequence
QLQPSLQTGTEEIKSLYNAV

SEQ ID NO: 10058 - protein, 20 aa, Artificial Sequence
  Description of Artificial Sequence: targeting sequence/synthetic sequence
EDVRGNLRGNTEGLQKSLAE

SEQ ID NO: 10059 - protein, 20 aa, Artificial Sequence
  Description of Artificial Sequence: targeting sequence/synthetic sequence
PEGAGGLPPPQRTQRSTEIL

SEQ ID NO: 10060 - protein, 20 aa, Artificial Sequence
  Description of Artificial Sequence: targeting sequence/synthetic sequence
IGVAMGIAGSDVSKQAADMI

SEQ ID NO: 10061 - protein, 20 aa, Artificial Sequence
  Description of Artificial Sequence: targeting sequence/synthetic sequence
LVREMSGSPASGIPVKVSAT

SEQ ID NO: 10062 - protein, 20 aa, Artificial Sequence
  Description of Artificial Sequence: targeting sequence/synthetic sequence
NGTGAGAVMGPNATAEEGAP

SEQ ID NO: 10063 - protein, 20 aa, Artificial Sequence
  Description of Artificial Sequence: targeting sequence/synthetic sequence
SPVCGSDGVTYSTECELKKA

SEQ ID NO: 10064 - protein, 20 aa, Artificial Sequence
  Description of Artificial Sequence: targeting sequence/synthetic sequence
MKKEMIMSDEAVEERRALIK

SEQ ID NO: 10065 - protein, 20 aa, Artificial Sequence
  Description of Artificial Sequence: targeting sequence/synthetic sequence
VLPGAEGPASGEGHAGNLAR

SEQ ID NO: 10066 - protein, 20 aa, Artificial Sequence
  Description of Artificial Sequence: targeting sequence/synthetic sequence
PVCGSDASTYSNECELQRAQ

SEQ ID NO: 10067 - protein, 20 aa, Artificial Sequence
  Description of Artificial Sequence: targeting sequence/synthetic sequence
GVGISGNEGMQATNNSDYAI

SEQ ID NO: 10068 - protein, 20 aa, Artificial Sequence
  Description of Artificial Sequence: targeting sequence/synthetic sequence
EEVIVEKTKQTVASISSGPK

SEQ ID NO: 10069 - protein, 20 aa, Artificial Sequence
  Description of Artificial Sequence: targeting sequence/synthetic sequence
ALSRSAVQESTGGKTQIAGL

SEQ ID NO: 10070 - protein, 20 aa, Artificial Sequence
  Description of Artificial Sequence: targeting sequence/synthetic sequence
QETIDRLAGKPTHVNVSVVM

SEQ ID NO: 10071 - protein, 20 aa, Artificial Sequence
  Description of Artificial Sequence: targeting sequence/synthetic sequence
EALHNHYTQKSLSLSPELQL

SEQ ID NO: 10072 - protein, 20 aa, Artificial Sequence
  Description of Artificial Sequence: targeting sequence/synthetic sequence
VGLEASNNGSMRNTSQDRER

SEQ ID NO: 10073 - protein, 20 aa, Artificial Sequence
  Description of Artificial Sequence: targeting sequence/synthetic sequence
LLVLGFEVQGTQQPQQDEMP

SEQ ID NO: 10074 - protein, 20 aa, Artificial Sequence
  Description of Artificial Sequence: targeting sequence/synthetic sequence
DEDTREALVKKFGAQNVARR

SEQ ID NO: 10075 - protein, 20 aa, Artificial Sequence
  Description of Artificial Sequence: targeting sequence/synthetic sequence
LLGATAIEDRLQAGVPETIA

SEQ ID NO: 10076 - protein, 20 aa, Artificial Sequence
  Description of Artificial Sequence: targeting sequence/synthetic sequence
PLAEDVRGNLRGNTEGLQKS

SEQ ID NO: 10077 - protein, 20 aa, Artificial Sequence
  Description of Artificial Sequence: targeting sequence/synthetic sequence
EQIADSQHRSHRQMATTTNP

SEQ ID NO: 10078 - protein, 20 aa, Artificial Sequence
  Description of Artificial Sequence: targeting sequence/synthetic sequence
HILQTASIQGDRVADVIESS

SEQ ID NO: 10079 - protein, 20 aa, Artificial Sequence
  Description of Artificial Sequence: targeting sequence/synthetic sequence
IVLEKELRLKETLKNQGVSN

SEQ ID NO: 10080 - protein, 20 aa, Artificial Sequence
  Description of Artificial Sequence: targeting sequence/synthetic sequence
LRQQDLDGELRSEKEGRDRK

SEQ ID NO: 10081 - protein, 20 aa, Artificial Sequence
  Description of Artificial Sequence: targeting sequence/synthetic sequence
NVTARNFPPSQDASGDLYTT

SEQ ID NO: 10082 - protein, 20 aa, Artificial Sequence
  Description of Artificial Sequence: targeting sequence/synthetic sequence
VRVADTVQTSATNSERVPNL

SEQ ID NO: 10083 - protein, 20 aa, Artificial Sequence
  Description of Artificial Sequence: targeting sequence/synthetic sequence
QILGQLQSSLQTGSEELKSL

SEQ ID NO: 10084 - protein, 20 aa, Artificial Sequence
  Description of Artificial Sequence: targeting sequence/synthetic sequence
GHLMGKKSTGESSSVSERGS

SEQ ID NO: 10085 - protein, 20 aa, Artificial Sequence
  Description of Artificial Sequence: targeting sequence/synthetic sequence
TAHVGVGISGNEGMQATNNS

SEQ ID NO: 10086 - protein, 20 aa, Artificial Sequence
  Description of Artificial Sequence: targeting sequence/synthetic sequence
FRTGVPPKNVEYTEGEEAKT

SEQ ID NO: 10087 - protein, 20 aa, Artificial Sequence
  Description of Artificial Sequence: targeting sequence/synthetic sequence
EWIGEINHSGSTNYNPSLKS

SEQ ID NO: 10088 - protein, 20 aa, Artificial Sequence
  Description of Artificial Sequence: targeting sequence/synthetic sequence
AATSRDALPNTEASGPTHSK

SEQ ID NO: 10089 - protein, 20 aa, Artificial Sequence
  Description of Artificial Sequence: targeting sequence/synthetic sequence
KKIIGQLQSSLQTGSEELKS

SEQ ID NO: 10090 - protein, 20 aa, Artificial Sequence
  Description of Artificial Sequence: targeting sequence/synthetic sequence
SRVADTIMSGPSNSQQVPAL

SEQ ID NO: 10091 - protein, 20 aa, Artificial Sequence
  Description of Artificial Sequence: targeting sequence/synthetic sequence
QILGQLQPALKTGTEDLQSL

SEQ ID NO: 10092 - protein, 20 aa, Artificial Sequence
  Description of Artificial Sequence: targeting sequence/synthetic sequence
GTTLYNPSLESRVTMSVDTS

SEQ ID NO: 10093 - protein, 20 aa, Artificial Sequence
  Description of Artificial Sequence: targeting sequence/synthetic sequence
VAPVCGSDASTYSNECELQR

SEQ ID NO: 10094 - protein, 20 aa, Artificial Sequence
  Description of Artificial Sequence: targeting sequence/synthetic sequence
VKGTGGESRDLPSGQGINNL

SEQ ID NO: 10095 - protein, 20 aa, Artificial Sequence
  Description of Artificial Sequence: targeting sequence/synthetic sequence
ASNNGSMRNTSQDREREVDN

SEQ ID NO: 10096 - protein, 20 aa, Artificial Sequence
  Description of Artificial Sequence: targeting sequence/synthetic sequence
VLSLAQEQVGGSPEKLQETS

SEQ ID NO: 10097 - protein, 20 aa, Artificial Sequence
  Description of Artificial Sequence: targeting sequence/synthetic sequence
NNGSMRNTSQDREREVDNNR

SEQ ID NO: 10098 - protein, 20 aa, Artificial Sequence
  Description of Artificial Sequence: targeting sequence/synthetic sequence
IERSIGRVADTIGSGPSNSE

SEQ ID NO: 10099 - protein, 20 aa, Artificial Sequence
  Description of Artificial Sequence: targeting sequence/synthetic sequence
NMEDSGHETGIDSQSQGSFQ

SEQ ID NO: 10100 - protein, 20 aa, Artificial Sequence
  Description of Artificial Sequence: targeting sequence/synthetic sequence
SGELGRILTVPESQKGALQG

SEQ ID NO: 10101 - protein, 20 aa, Artificial Sequence
  Description of Artificial Sequence: targeting sequence/synthetic sequence
QQDLDGELRSEKEGRDRKKD

SEQ ID NO: 10102 - protein, 20 aa, Artificial Sequence
  Description of Artificial Sequence: targeting sequence/synthetic sequence
ATKVCGSDGVTYGNECQLKT

SEQ ID NO: 10103 - protein, 20 aa, Artificial Sequence
  Description of Artificial Sequence: targeting sequence/synthetic sequence
IGEINHSGSTNYNPSLKSRV

SEQ ID NO: 10104 - protein, 20 aa, Artificial Sequence
  Description of Artificial Sequence: targeting sequence/synthetic sequence
KSEVSTDLIQANPKQGALAK

SEQ ID NO: 10105 - protein, 20 aa, Artificial Sequence
  Description of Artificial Sequence: targeting sequence/synthetic sequence
HATKTAKDALSSVQESQVAQ

SEQ ID NO: 10106 - protein, 20 aa, Artificial Sequence
  Description of Artificial Sequence: targeting sequence/synthetic sequence
AKKDDQMLKRRNVSSFPDDA

SEQ ID NO: 10107 - protein, 20 aa, Artificial Sequence
  Description of Artificial Sequence: targeting sequence/synthetic sequence
KIIRQLQPSLQTGSEELKSL

SEQ ID NO: 10108 - protein, 20 aa, Artificial Sequence
  Description of Artificial Sequence: targeting sequence/synthetic sequence
GRILTVPESQKGALQGYRDA

SEQ ID NO: 10109 - protein, 20 aa, Artificial Sequence
  Description of Artificial Sequence: targeting sequence/synthetic sequence
SEEDQSLENSEADVKESRKD

SEQ ID NO: 10110 - protein, 20 aa, Artificial Sequence
  Description of Artificial Sequence: targeting sequence/synthetic sequence
SAVSRVADTIMSGPSNSQQV

SEQ ID NO: 10111 - protein, 20 aa, Artificial Sequence
  Description of Artificial Sequence: targeting sequence/synthetic sequence
SISPDDPPREITDENLHKIR

SEQ ID NO: 10112 - protein, 20 aa, Artificial Sequence
  Description of Artificial Sequence: targeting sequence/synthetic sequence
IVRVADTLPSGPSNSESIPA

SEQ ID NO: 10113 - protein, 20 aa, Artificial Sequence
  Description of Artificial Sequence: targeting sequence/synthetic sequence
AALVQQEEEKAEQRKRARAE

SEQ ID NO: 10114 - protein, 20 aa, Artificial Sequence
  Description of Artificial Sequence: targeting sequence/synthetic sequence
TQGVNDGDMRLADGGATNQG

SEQ ID NO: 10115 - protein, 20 aa, Artificial Sequence
  Description of Artificial Sequence: targeting sequence/synthetic sequence
ESRGHSATQLPAEKTVGGPS

SEQ ID NO: 10116 - protein, 20 aa, Artificial Sequence
  Description of Artificial Sequence: targeting sequence/synthetic sequence
HQASLSKQPTSQPRGDPTGP

SEQ ID NO: 10117 - protein, 20 aa, Artificial Sequence
  Description of Artificial Sequence: targeting sequence/synthetic sequence
QGSSSQSQGISSSSTSTMPN

SEQ ID NO: 10118 - protein, 20 aa, Artificial Sequence
  Description of Artificial Sequence: targeting sequence/synthetic sequence
ENAVARVADTIGSGPSNSQA

SEQ ID NO: 10119 - protein, 20 aa, Artificial Sequence
  Description of Artificial Sequence: targeting sequence/synthetic sequence
DASTYSNECELQRAQCSQQR

SEQ ID NO: 10120 - protein, 20 aa, Artificial Sequence
  Description of Artificial Sequence: targeting sequence/synthetic sequence
KESGGGVTKESAEKGFEKIG

SEQ ID NO: 10121 - protein, 20 aa, Artificial Sequence
  Description of Artificial Sequence: targeting sequence/synthetic sequence
QIIRQLQPSLQTGSEELRSL

SEQ ID NO: 10122 - protein, 20 aa, Artificial Sequence
  Description of Artificial Sequence: targeting sequence/synthetic sequence
RKREKQLSQTQSQQQVQEAE

SEQ ID NO: 10123 - protein, 20 aa, Artificial Sequence
  Description of Artificial Sequence: targeting sequence/synthetic sequence
PEGSSISAPSQTSVDVSLIQ

SEQ ID NO: 10124 - protein, 20 aa, Artificial Sequence
  Description of Artificial Sequence: targeting sequence/synthetic sequence
HLMGKKSTGESSSVSERGSL

SEQ ID NO: 10125 - protein, 20 aa, Artificial Sequence
  Description of Artificial Sequence: targeting sequence/synthetic sequence
SEMANKRMKVKHDDHYELIV

SEQ ID NO: 10126 - protein, 20 aa, Artificial Sequence
  Description of Artificial Sequence: targeting sequence/synthetic sequence
EASNNGSMRNTSQDREREVD

SEQ ID NO: 10127 - protein, 20 aa, Artificial Sequence
  Description of Artificial Sequence: targeting sequence/synthetic sequence
HGAAFQLTQGDQLSTHTDGI

SEQ ID NO: 10128 - protein, 20 aa, Artificial Sequence
  Description of Artificial Sequence: targeting sequence/synthetic sequence
SIVLEKELRLKETLKNQGVS

SEQ ID NO: 10129 - protein, 20 aa, Artificial Sequence
  Description of Artificial Sequence: targeting sequence/synthetic sequence
IEKLNDRITHDEQAIRDLTL

SEQ ID NO: 10130 - protein, 20 aa, Artificial Sequence
  Description of Artificial Sequence: targeting sequence/synthetic sequence
PEENAPSEGQRVWGQGQSPR

SEQ ID NO: 10131 - protein, 20 aa, Artificial Sequence
  Description of Artificial Sequence: targeting sequence/synthetic sequence
WYVDGVEVHNAKTKPREEQF

SEQ ID NO: 10132 - protein, 20 aa, Artificial Sequence
  Description of Artificial Sequence: targeting sequence/synthetic sequence
PLYADTATTNKEKTIKISSS

SEQ ID NO: 10133 - protein, 20 aa, Artificial Sequence
  Description of Artificial Sequence: targeting sequence/synthetic sequence
EIIHAANQAVDQAGIEKLVE

SEQ ID NO: 10134 - protein, 20 aa, Artificial Sequence
  Description of Artificial Sequence: targeting sequence/synthetic sequence
TQSQGSSSQSQGISSSSTST

SEQ ID NO: 10135 - protein, 20 aa, Artificial Sequence
  Description of Artificial Sequence: targeting sequence/synthetic sequence
ITAAIGRVADTVGTGPTNSE

SEQ ID NO: 10136 - protein, 20 aa, Artificial Sequence
  Description of Artificial Sequence: targeting sequence/synthetic sequence
LGLSKSDSSNSDSTQSQKSG

SEQ ID NO: 10137 - protein, 20 aa, Artificial Sequence
  Description of Artificial Sequence: targeting sequence/synthetic sequence
LEASNNGSMRNTSQDREREV

SEQ ID NO: 10138 - protein, 20 aa, Artificial Sequence
  Description of Artificial Sequence: targeting sequence/synthetic sequence
QIIGQLQPAIQTGTEELRSL

SEQ ID NO: 10139 - protein, 20 aa, Artificial Sequence
  Description of Artificial Sequence: targeting sequence/synthetic sequence
PAAAPAPASVPQISQPPFLL

SEQ ID NO: 10140 - protein, 20 aa, Artificial Sequence
  Description of Artificial Sequence: targeting sequence/synthetic sequence
VDKSWIPEGVVRSNGHASTD

SEQ ID NO: 10141 - protein, 20 aa, Artificial Sequence
  Description of Artificial Sequence: targeting sequence/synthetic sequence
GPGPGPGPGPGADMQRSYDS

SEQ ID NO: 10142 - protein, 20 aa, Artificial Sequence
  Description of Artificial Sequence: targeting sequence/synthetic sequence
QKIISVLEPLVPTGSENLKS

SEQ ID NO: 10143 - protein, 20 aa, Artificial Sequence
  Description of Artificial Sequence: targeting sequence/synthetic sequence
LKVLSLAQEQVGGSPEKLQE

SEQ ID NO: 10144 - protein, 20 aa, Artificial Sequence
  Description of Artificial Sequence: targeting sequence/synthetic sequence
GAIGRVADTIRSGPSNSEAV

SEQ ID NO: 10145 - protein, 20 aa, Artificial Sequence
  Description of Artificial Sequence: targeting sequence/synthetic sequence
ESRKDVLPGAEGPASGEGHA

SEQ ID NO: 10146 - protein, 20 aa, Artificial Sequence
  Description of Artificial Sequence: targeting sequence/synthetic sequence
SQSQGISSSSTSTMPNSSQS

SEQ ID NO: 10147 - protein, 20 aa, Artificial Sequence
  Description of Artificial Sequence: targeting sequence/synthetic sequence
TVSGTDCVAKEATEAAKCNL

SEQ ID NO: 10148 - protein, 20 aa, Artificial Sequence
  Description of Artificial Sequence: targeting sequence/synthetic sequence
AIEKLNDRITHDEQAIRDLT

SEQ ID NO: 10149 - protein, 20 aa, Artificial Sequence
  Description of Artificial Sequence: targeting sequence/synthetic sequence
IAIEKLNDRISHDEQAIRDL

SEQ ID NO: 10150 - protein, 20 aa, Artificial Sequence
  Description of Artificial Sequence: targeting sequence/synthetic sequence
TDLRFQSAVVGALQEASEAY

SEQ ID NO: 10151 - protein, 20 aa, Artificial Sequence
  Description of Artificial Sequence: targeting sequence/synthetic sequence
AVSRVADTIMSGPSNSQQVP

SEQ ID NO: 10152 - protein, 20 aa, Artificial Sequence
  Description of Artificial Sequence: targeting sequence/synthetic sequence
KRKFAIGSAREADPALNVET

SEQ ID NO: 10153 - protein, 20 aa, Artificial Sequence
  Description of Artificial Sequence: targeting sequence/synthetic sequence
CKDTSHILQTASIQGDRVAD

SEQ ID NO: 10154 - protein, 20 aa, Artificial Sequence
  Description of Artificial Sequence: targeting sequence/synthetic sequence
NTDLRFQSAVVGALQEASEA

SEQ ID NO: 10155 - protein, 20 aa, Artificial Sequence
  Description of Artificial Sequence: targeting sequence/synthetic sequence
AQREMGPVASADKPTTKLSA

SEQ ID NO: 10156 - protein, 20 aa, Artificial Sequence
  Description of Artificial Sequence: targeting sequence/synthetic sequence
HEDSRTLLNASRSLEVSYLA

SEQ ID NO: 10157 - protein, 20 aa, Artificial Sequence
  Description of Artificial Sequence: targeting sequence/synthetic sequence
DKGAQGLPGITGQSGLPGLP

SEQ ID NO: 10158 - protein, 20 aa, Artificial Sequence
  Description of Artificial Sequence: targeting sequence/synthetic sequence
VSHEDSRTLLNASRSLEVSY

SEQ ID NO: 10159 - protein, 20 aa, Artificial Sequence
  Description of Artificial Sequence: targeting sequence/synthetic sequence
TVGAATSRDALPNTEASGPT

SEQ ID NO: 10160 - protein, 20 aa, Artificial Sequence
  Description of Artificial Sequence: targeting sequence/synthetic sequence
TVKSIVLEKELRLKETLKNQ

SEQ ID NO: 10161 - protein, 20 aa, Artificial Sequence
  Description of Artificial Sequence: targeting sequence/synthetic sequence
APVCGSDASTYSNECELQRA

SEQ ID NO: 10162 - protein, 20 aa, Artificial Sequence
  Description of Artificial Sequence: targeting sequence/synthetic sequence
ALQMSSPGRKEECESQGEVQ

SEQ ID NO: 10163 - protein, 20 aa, Artificial Sequence
  Description of Artificial Sequence: targeting sequence/synthetic sequence
REKQLSQTQSQQQVQEAEGA

SEQ ID NO: 10164 - protein, 20 aa, Artificial Sequence
  Description of Artificial Sequence: targeting sequence/synthetic sequence
SSHEEDTDGHVAAGSTLARR

SEQ ID NO: 10165 - protein, 20 aa, Artificial Sequence
  Description of Artificial Sequence: targeting sequence/synthetic sequence
SVGKIECVSAETTEDCIAKI

SEQ ID NO: 10166 - protein, 20 aa, Artificial Sequence
  Description of Artificial Sequence: targeting sequence/synthetic sequence
IDSLLENDRQQTHMLDVMQD

SEQ ID NO: 10167 - protein, 20 aa, Artificial Sequence
  Description of Artificial Sequence: targeting sequence/synthetic sequence
DDQMLKRRNVSSFPDDATSP

SEQ ID NO: 10168 - protein, 20 aa, Artificial Sequence
  Description of Artificial Sequence: targeting sequence/synthetic sequence
NLLEKMLVLDAEQRVTAGEA

SEQ ID NO: 10169 - protein, 20 aa, Artificial Sequence
  Description of Artificial Sequence: targeting sequence/synthetic sequence
DRIDSLLENDRQQTHMLDVM

SEQ ID NO: 10170 - protein, 20 aa, Artificial Sequence
  Description of Artificial Sequence: targeting sequence/synthetic sequence
SPAPEENAPSEGQRVWGQGQ

SEQ ID NO: 10171 - protein, 20 aa, Artificial Sequence
  Description of Artificial Sequence: targeting sequence/synthetic sequence
ALLAQLYRDKTAAEGAVAGV

SEQ ID NO: 10172 - protein, 20 aa, Artificial Sequence
  Description of Artificial Sequence: targeting sequence/synthetic sequence
CEEQLEETIKNCLSAAEDKK

SEQ ID NO: 10173 - protein, 20 aa, Artificial Sequence
  Description of Artificial Sequence: targeting sequence/synthetic sequence
RRKILIRGLPGDVTNQEVHD

SEQ ID NO: 10174 - protein, 20 aa, Artificial Sequence
  Description of Artificial Sequence: targeting sequence/synthetic sequence
LQALVREMSGSPASGIPVKV

SEQ ID NO: 10175 - protein, 20 aa, Artificial Sequence
  Description of Artificial Sequence: targeting sequence/synthetic sequence
GVTARNFPPSQDASGDLYTT

SEQ ID NO: 10176 - protein, 20 aa, Artificial Sequence
  Description of Artificial Sequence: targeting sequence/synthetic sequence
AITAAIGRVADTVGTGPTNS

SEQ ID NO: 10177 - protein, 20 aa, Artificial Sequence
  Description of Artificial Sequence: targeting sequence/synthetic sequence
PSGESRGHSATQLPAEKTVG

SEQ ID NO: 10178 - protein, 20 aa, Artificial Sequence
  Description of Artificial Sequence: targeting sequence/synthetic sequence
LRVTTVASHTSDSDVPSGVT

SEQ ID NO: 10179 - protein, 20 aa, Artificial Sequence
  Description of Artificial Sequence: targeting sequence/synthetic sequence
VSGGGVTKESAEKGFEKIGN

SEQ ID NO: 10180 - protein, 20 aa, Artificial Sequence
  Description of Artificial Sequence: targeting sequence/synthetic sequence
HLQKELAELRESTSQMHTAS

SEQ ID NO: 10181 - protein, 20 aa, Artificial Sequence
  Description of Artificial Sequence: targeting sequence/synthetic sequence
GAPVNISSSDLTGRQDTSRM

SEQ ID NO: 10182 - protein, 20 aa, Artificial Sequence
  Description of Artificial Sequence: targeting sequence/synthetic sequence
RVADTVSSKPTNSESIPALT

SEQ ID NO: 10183 - protein, 20 aa, Artificial Sequence
  Description of Artificial Sequence: targeting sequence/synthetic sequence
VSSRMDSTGVPDRIQVTTDL

SEQ ID NO: 10184 - protein, 20 aa, Artificial Sequence
  Description of Artificial Sequence: targeting sequence/synthetic sequence
RKILIRGLPGDVTNQEVHDL

SEQ ID NO: 10185 - protein, 20 aa, Artificial Sequence
  Description of Artificial Sequence: targeting sequence/synthetic sequence
CGSDASTYSNECELQRAQCS

SEQ ID NO: 10186 - protein, 20 aa, Artificial Sequence
  Description of Artificial Sequence: targeting sequence/synthetic sequence
LGQLQSSLQTGSEELKSLYN

SEQ ID NO: 10187 - protein, 20 aa, Artificial Sequence
  Description of Artificial Sequence: targeting sequence/synthetic sequence
TPRHLQLAIRGDEELDSLIK

SEQ ID NO: 10188 - protein, 20 aa, Artificial Sequence
  Description of Artificial Sequence: targeting sequence/synthetic sequence
AFRAGVPPKNVEYTEGEEAK

SEQ ID NO: 10189 - protein, 20 aa, Artificial Sequence
  Description of Artificial Sequence: targeting sequence/synthetic sequence
VQGERVAGQPVVLDVAAGGI

SEQ ID NO: 10190 - protein, 20 aa, Artificial Sequence
  Description of Artificial Sequence: targeting sequence/synthetic sequence
RSQLLIMDRAADPVSPLLHE

SEQ ID NO: 10191 - protein, 20 aa, Artificial Sequence
  Description of Artificial Sequence: targeting sequence/synthetic sequence
DAKGLSNPSEVETLREKVYA

SEQ ID NO: 10192 - protein, 20 aa, Artificial Sequence
  Description of Artificial Sequence: targeting sequence/synthetic sequence
TTAGVAMGTASLTLSAQSRT

SEQ ID NO: 10193 - protein, 20 aa, Artificial Sequence
  Description of Artificial Sequence: targeting sequence/synthetic sequence
SDILQTGTIQGDRVADVIES

SEQ ID NO: 10194 - protein, 20 aa, Artificial Sequence
  Description of Artificial Sequence: targeting sequence/synthetic sequence
AEKEAALVQQEEEKAEQRKR

SEQ ID NO: 10195 - protein, 20 aa, Artificial Sequence
  Description of Artificial Sequence: targeting sequence/synthetic sequence
IGQLQSSLQTGSEELKSLYN

SEQ ID NO: 10196 - protein, 20 aa, Artificial Sequence
  Description of Artificial Sequence: targeting sequence/synthetic sequence
GAATSRDALPNTEASGPTHS

SEQ ID NO: 10197 - protein, 20 aa, Artificial Sequence
  Description of Artificial Sequence: targeting sequence/synthetic sequence
IGQLQPSIQTGSEEIRSLYN

SEQ ID NO: 10198 - protein, 20 aa, Artificial Sequence
  Description of Artificial Sequence: targeting sequence/synthetic sequence
SNNGSMRNTSQDREREVDNN

SEQ ID NO: 10199 - protein, 20 aa, Artificial Sequence
  Description of Artificial Sequence: targeting sequence/synthetic sequence
GIGSIVTSMGSSMPPSPSNG

SEQ ID NO: 10200 - protein, 20 aa, Artificial Sequence
  Description of Artificial Sequence: targeting sequence/synthetic sequence
MMEHEMGGHHPGADYPVDGL

SEQ ID NO: 10201 - protein, 20 aa, Artificial Sequence
  Description of Artificial Sequence: targeting sequence/synthetic sequence
KQIIKQLQPALQTGTEELKS

SEQ ID NO: 10202 - protein, 20 aa, Artificial Sequence
  Description of Artificial Sequence: targeting sequence/synthetic sequence
VESAVSRVADTIMSGPSNSQ

SEQ ID NO: 10203 - protein, 20 aa, Artificial Sequence
  Description of Artificial Sequence: targeting sequence/synthetic sequence
AHVGVGISGNEGMQATNNSD

SEQ ID NO: 10204 - protein, 20 aa, Artificial Sequence
  Description of Artificial Sequence: targeting sequence/synthetic sequence
QGVNDGDMRLADGGATNQGR

SEQ ID NO: 10205 - protein, 20 aa, Artificial Sequence
  Description of Artificial Sequence: targeting sequence/synthetic sequence
GYISKESDSASDGITQAAAL

SEQ ID NO: 10206 - protein, 20 aa, Artificial Sequence
  Description of Artificial Sequence: targeting sequence/synthetic sequence
LVQLQPALQTGTEEIKSLYN

SEQ ID NO: 10207 - protein, 20 aa, Artificial Sequence
  Description of Artificial Sequence: targeting sequence/synthetic sequence
LFPATDASCEDKSAARGLAQ

SEQ ID NO: 10208 - protein, 20 aa, Artificial Sequence
  Description of Artificial Sequence: targeting sequence/synthetic sequence
AGAVMGPNATAEEGAPSAAA

SEQ ID NO: 10209 - protein, 20 aa, Artificial Sequence
  Description of Artificial Sequence: targeting sequence/synthetic sequence
TQSGAQREMGPVASADKPTT

SEQ ID NO: 10210 - protein, 20 aa, Artificial Sequence
  Description of Artificial Sequence: targeting sequence/synthetic sequence
LSKSDSSNSDSTQSQKSGRN

SEQ ID NO: 10211 - protein, 20 aa, Artificial Sequence
  Description of Artificial Sequence: targeting sequence/synthetic sequence
EQIADSQHRSHRQMTTTTNP

SEQ ID NO: 10212 - protein, 20 aa, Artificial Sequence
  Description of Artificial Sequence: targeting sequence/synthetic sequence
VMHEALHNHYTQKSLSLSPG

SEQ ID NO: 10213 - protein, 20 aa, Artificial Sequence
  Description of Artificial Sequence: targeting sequence/synthetic sequence
HNHYTQKSLSLSPELQLEES

SEQ ID NO: 10214 - protein, 20 aa, Artificial Sequence
  Description of Artificial Sequence: targeting sequence/synthetic sequence
GVLSAAGSTMGAAATTLAVQ

SEQ ID NO: 10215 - protein, 20 aa, Artificial Sequence
  Description of Artificial Sequence: targeting sequence/synthetic sequence
QITAGIALAEAREARKDIAL

SEQ ID NO: 10216 - protein, 20 aa, Artificial Sequence
  Description of Artificial Sequence: targeting sequence/synthetic sequence
NGSMRNTSQDREREVDNNRE

SEQ ID NO: 10217 - protein, 20 aa, Artificial Sequence
  Description of Artificial Sequence: targeting sequence/synthetic sequence
GVTTDQVQAEAKESGPTTYK

SEQ ID NO: 10218 - protein, 20 aa, Artificial Sequence
  Description of Artificial Sequence: targeting sequence/synthetic sequence
VFALDQKMRPSTDTITVMVE

SEQ ID NO: 10219 - protein, 20 aa, Artificial Sequence
  Description of Artificial Sequence: targeting sequence/synthetic sequence
RPKTGVRGLHKSLTDVALEH

SEQ ID NO: 10220 - protein, 20 aa, Artificial Sequence
  Description of Artificial Sequence: targeting sequence/synthetic sequence
ESLVEEERPSGPGGGGKQRA

SEQ ID NO: 10221 - protein, 20 aa, Artificial Sequence
  Description of Artificial Sequence: targeting sequence/synthetic sequence
ISPDDPPREITDENLHKIRL

SEQ ID NO: 10222 - protein, 20 aa, Artificial Sequence
  Description of Artificial Sequence: targeting sequence/synthetic sequence
EAHLAEENDGDNACKRTYSD

SEQ ID NO: 10223 - protein, 20 aa, Artificial Sequence
  Description of Artificial Sequence: targeting sequence/synthetic sequence
SGSTTYNPSLKSRVTLSLDT

SEQ ID NO: 10224 - protein, 20 aa, Artificial Sequence
  Description of Artificial Sequence: targeting sequence/synthetic sequence
APTLFPLVSCENSPSDTSSV

SEQ ID NO: 10225 - protein, 20 aa, Artificial Sequence
  Description of Artificial Sequence: targeting sequence/synthetic sequence
ARNFPPSQDASGDLYTTSSQ

SEQ ID NO: 10226 - protein, 20 aa, Artificial Sequence
  Description of Artificial Sequence: targeting sequence/synthetic sequence
YADTATTNKEKTIKISSSGN

SEQ ID NO: 10227 - protein, 20 aa, Artificial Sequence
  Description of Artificial Sequence: targeting sequence/synthetic sequence
APVCGDDGVTYENDCVMGRS

SEQ ID NO: 10228 - protein, 20 aa, Artificial Sequence
  Description of Artificial Sequence: targeting sequence/synthetic sequence
NLLLLGATAIEDRLQAGVPE

SEQ ID NO: 10229 - protein, 20 aa, Artificial Sequence
  Description of Artificial Sequence: targeting sequence/synthetic sequence
RAIARVADTISSGPVNSESI

SEQ ID NO: 10230 - protein, 20 aa, Artificial Sequence
  Description of Artificial Sequence: targeting sequence/synthetic sequence
TLYEINYKAVGSLDPSADLS

SEQ ID NO: 10231 - protein, 20 aa, Artificial Sequence
  Description of Artificial Sequence: targeting sequence/synthetic sequence
LVLLAVLPVLLLQITVGLVF

SEQ ID NO: 10232 - protein, 20 aa, Artificial Sequence
  Description of Artificial Sequence: targeting sequence/synthetic sequence
EEDTDGHVAAGSTLARRKRS

SEQ ID NO: 10233 - protein, 20 aa, Artificial Sequence
  Description of Artificial Sequence: targeting sequence/synthetic sequence
QQILGQLQPALKTGTEDLQS

SEQ ID NO: 10234 - protein, 20 aa, Artificial Sequence
  Description of Artificial Sequence: targeting sequence/synthetic sequence
PRHLQLAIRGDEELDSLIKA

SEQ ID NO: 10235 - protein, 20 aa, Artificial Sequence
  Description of Artificial Sequence: targeting sequence/synthetic sequence
GRMLVLDSDQRVSAAEALAH

SEQ ID NO: 10236 - protein, 20 aa, Artificial Sequence
  Description of Artificial Sequence: targeting sequence/synthetic sequence
SDKCEEQLEETIKNCLSAAE

SEQ ID NO: 10237 - protein, 20 aa, Artificial Sequence
  Description of Artificial Sequence: targeting sequence/synthetic sequence
QKELAELRESTSQMHTASSL

SEQ ID NO: 10238 - protein, 20 aa, Artificial Sequence
  Description of Artificial Sequence: targeting sequence/synthetic sequence
KEEALQMSSPGRKEECESQG

SEQ ID NO: 10239 - protein, 20 aa, Artificial Sequence
  Description of Artificial Sequence: targeting sequence/synthetic sequence
VEIIHAANQAVDQAGIEKLV

SEQ ID NO: 10240 - protein, 20 aa, Artificial Sequence
  Description of Artificial Sequence: targeting sequence/synthetic sequence
KDVLPGAEGPASGEGHAGNL

SEQ ID NO: 10241 - protein, 20 aa, Artificial Sequence
  Description of Artificial Sequence: targeting sequence/synthetic sequence
SPPESLVEEERPSGPGGGGK

SEQ ID NO: 10242 - protein, 20 aa, Artificial Sequence
  Description of Artificial Sequence: targeting sequence/synthetic sequence
PATCRGAPEGTVCGSDGADY

SEQ ID NO: 10243 - protein, 20 aa, Artificial Sequence
  Description of Artificial Sequence: targeting sequence/synthetic sequence
AGIALAEAREARKDIALIKD

SEQ ID NO: 10244 - protein, 20 aa, Artificial Sequence
  Description of Artificial Sequence: targeting sequence/synthetic sequence
QKILKVLEPLVPTGSENLKS

SEQ ID NO: 10245 - protein, 20 aa, Artificial Sequence
  Description of Artificial Sequence: targeting sequence/synthetic sequence
VFEDVKGTGGESRDLPSGQG

SEQ ID NO: 10246 - protein, 20 aa, Artificial Sequence
  Description of Artificial Sequence: targeting sequence/synthetic sequence
TTSIATTTTTTTESVEEVVR

SEQ ID NO: 10247 - protein, 20 aa, Artificial Sequence
  Description of Artificial Sequence: targeting sequence/synthetic sequence
IVTSMGSSMPPSPSNGSSFS

SEQ ID NO: 10248 - protein, 20 aa, Artificial Sequence
  Description of Artificial Sequence: targeting sequence/synthetic sequence
EALKENGGARLAEYHAKATE

SEQ ID NO: 10249 - protein, 20 aa, Artificial Sequence
  Description of Artificial Sequence: targeting sequence/synthetic sequence
ERCVDKSWIPEGVVRSNGHA

SEQ ID NO: 10250 - protein, 20 aa, Artificial Sequence
  Description of Artificial Sequence: targeting sequence/synthetic sequence
CCLVPVSLAEDPQGDAAQKT

SEQ ID NO: 10251 - protein, 20 aa, Artificial Sequence
  Description of Artificial Sequence: targeting sequence/synthetic sequence
SGVTTDQVQAEAKESGPTTY

SEQ ID NO: 10252 - protein, 20 aa, Artificial Sequence
  Description of Artificial Sequence: targeting sequence/synthetic sequence
KLSDGVAVLKVGGTSDVEVN

SEQ ID NO: 10253 - protein, 20 aa, Artificial Sequence
  Description of Artificial Sequence: targeting sequence/synthetic sequence
PESLVEEERPSGPGGGGKQR

SEQ ID NO: 10254 - protein, 20 aa, Artificial Sequence
  Description of Artificial Sequence: targeting sequence/synthetic sequence
VNSVGKIECVSAETTEDCIA

SEQ ID NO: 10255 - protein, 20 aa, Artificial Sequence
  Description of Artificial Sequence: targeting sequence/synthetic sequence
KTRSQLLIMDRAADPVSPLL

SEQ ID NO: 10256 - protein, 20 aa, Artificial Sequence
  Description of Artificial Sequence: targeting sequence/synthetic sequence
SNDQPQNVDSVCSGTLQKTE

SEQ ID NO: 10257 - protein, 20 aa, Artificial Sequence
  Description of Artificial Sequence: targeting sequence/synthetic sequence
HLAEENDGDNACKRTYSDRG

SEQ ID NO: 10258 - protein, 20 aa, Artificial Sequence
  Description of Artificial Sequence: targeting sequence/synthetic sequence
SIVRVADTLPSGPSNSESIP

SEQ ID NO: 10259 - protein, 20 aa, Artificial Sequence
  Description of Artificial Sequence: targeting sequence/synthetic sequence
KDDEDTREALVKKFGAQNVA

SEQ ID NO: 10260 - protein, 20 aa, Artificial Sequence
  Description of Artificial Sequence: targeting sequence/synthetic sequence
PTLFPLVSCENSPSDTSSVA

SEQ ID NO: 10261 - protein, 20 aa, Artificial Sequence
  Description of Artificial Sequence: targeting sequence/synthetic sequence
AGEPGKNGAKGEPGPRGERG

SEQ ID NO: 10262 - protein, 20 aa, Artificial Sequence
  Description of Artificial Sequence: targeting sequence/synthetic sequence
PGPGPGPGPGADMQRSYDSY

SEQ ID NO: 10263 - protein, 20 aa, Artificial Sequence
  Description of Artificial Sequence: targeting sequence/synthetic sequence
CPEGSSISAPSQTSVDVSLI

SEQ ID NO: 10264 - protein, 20 aa, Artificial Sequence
  Description of Artificial Sequence: targeting sequence/synthetic sequence
IEKNLLLLGATAIEDRLQAG

SEQ ID NO: 10265 - protein, 20 aa, Artificial Sequence
  Description of Artificial Sequence: targeting sequence/synthetic sequence
LDQKMRPSTDTITVMVENSH

SEQ ID NO: 10266 - protein, 20 aa, Artificial Sequence
  Description of Artificial Sequence: targeting sequence/synthetic sequence
MISRTPEVTCVVVDVSQEDP

SEQ ID NO: 10267 - protein, 20 aa, Artificial Sequence
  Description of Artificial Sequence: targeting sequence/synthetic sequence
VTTDQVQAEAKESGPTTYKV

SEQ ID NO: 10268 - protein, 20 aa, Artificial Sequence
  Description of Artificial Sequence: targeting sequence/synthetic sequence
VEQTSLEPLQESPRPTGVWK

SEQ ID NO: 10269 - protein, 20 aa, Artificial Sequence
  Description of Artificial Sequence: targeting sequence/synthetic sequence
GGAVTELTTELANMGNLSTD

SEQ ID NO: 10270 - protein, 20 aa, Artificial Sequence
  Description of Artificial Sequence: targeting sequence/synthetic sequence
LVLGFEVQGTQQPQQDEMPS

SEQ ID NO: 10271 - protein, 20 aa, Artificial Sequence
  Description of Artificial Sequence: targeting sequence/synthetic sequence
AKLSDGVAVLKVGGTSDVEV

SEQ ID NO: 10272 - protein, 20 aa, Artificial Sequence
  Description of Artificial Sequence: targeting sequence/synthetic sequence
DTPNCPDASDEAACEKYTSG

SEQ ID NO: 10273 - protein, 20 aa, Artificial Sequence
  Description of Artificial Sequence: targeting sequence/synthetic sequence
ILGQLQPALQTGSEELKSLY

SEQ ID NO: 10274 - protein, 20 aa, Artificial Sequence
  Description of Artificial Sequence: targeting sequence/synthetic sequence
EWESSGQPENNYNTTPPMLD

SEQ ID NO: 10275 - protein, 20 aa, Artificial Sequence
  Description of Artificial Sequence: targeting sequence/synthetic sequence
CKDTEDIEQTANIQGDPIAD

SEQ ID NO: 10276 - protein, 20 aa, Artificial Sequence
  Description of Artificial Sequence: targeting sequence/synthetic sequence
EHEMGGHHPGADYPVDGLPD

SEQ ID NO: 10277 - protein, 20 aa, Artificial Sequence
  Description of Artificial Sequence: targeting sequence/synthetic sequence
AVTELTTELANMGNLSTDSA

SEQ ID NO: 10278 - protein, 20 aa, Artificial Sequence
  Description of Artificial Sequence: targeting sequence/synthetic sequence
PGADGQPGAKGEPGDAGAKG

SEQ ID NO: 10279 - protein, 20 aa, Artificial Sequence
  Description of Artificial Sequence: targeting sequence/synthetic sequence
GEPGSDGIPGSAGEKGEPGL

SEQ ID NO: 10280 - protein, 20 aa, Artificial Sequence
  Description of Artificial Sequence: targeting sequence/synthetic sequence
GAATSRDALPNTEASGPAHS

SEQ ID NO: 10281 - protein, 20 aa, Artificial Sequence
  Description of Artificial Sequence: targeting sequence/synthetic sequence
TVELDVSDEEMARRYETLVG

SEQ ID NO: 10282 - protein, 20 aa, Artificial Sequence
  Description of Artificial Sequence: targeting sequence/synthetic sequence
GFLTTAGAAMGAASLTLSAQ

SEQ ID NO: 10283 - protein, 20 aa, Artificial Sequence
  Description of Artificial Sequence: targeting sequence/synthetic sequence
KVLSLAQEQVGGSPEKLQET

SEQ ID NO: 10284 - protein, 20 aa, Artificial Sequence
  Description of Artificial Sequence: targeting sequence/synthetic sequence
EGAIGRVADTIRSGPSNSEA

SEQ ID NO: 10285 - protein, 20 aa, Artificial Sequence
  Description of Artificial Sequence: targeting sequence/synthetic sequence
TERTTSIATTTTTTTESVEE

SEQ ID NO: 10286 - protein, 20 aa, Artificial Sequence
  Description of Artificial Sequence: targeting sequence/synthetic sequence
VRLLRDTTHISQSALPQGIE

SEQ ID NO: 10287 - protein, 20 aa, Artificial Sequence
  Description of Artificial Sequence: targeting sequence/synthetic sequence
GDAGPAGPKGEPGSPGENGA

SEQ ID NO: 10288 - protein, 20 aa, Artificial Sequence
  Description of Artificial Sequence: targeting sequence/synthetic sequence
VEFTVSGTDCVAKEATEAAK

SEQ ID NO: 10289 - protein, 20 aa, Artificial Sequence
  Description of Artificial Sequence: targeting sequence/synthetic sequence
QSQGIQQLLQAEKRAAEKVA

SEQ ID NO: 10290 - protein, 20 aa, Artificial Sequence
  Description of Artificial Sequence: targeting sequence/synthetic sequence
LEPTPSSQEAQRALGTSPEL

SEQ ID NO: 10291 - protein, 20 aa, Artificial Sequence
  Description of Artificial Sequence: targeting sequence/synthetic sequence
MEDSGHETGIDSQSQGSFQA

SEQ ID NO: 10292 - protein, 20 aa, Artificial Sequence
  Description of Artificial Sequence: targeting sequence/synthetic sequence
RVAAGVLCELAQDKEAAEAI

SEQ ID NO: 10293 - protein, 20 aa, Artificial Sequence
  Description of Artificial Sequence: targeting sequence/synthetic sequence
PAGAAGPAGNPGADGQPGAK

SEQ ID NO: 10294 - protein, 20 aa, Artificial Sequence
  Description of Artificial Sequence: targeting sequence/synthetic sequence
PRHLQLAIRNDEELNKLLGK

SEQ ID NO: 10295 - protein, 20 aa, Artificial Sequence
  Description of Artificial Sequence: targeting sequence/synthetic sequence
GVEQTKQCKEEPKEEKVVKT

SEQ ID NO: 10296 - protein, 20 aa, Artificial Sequence
  Description of Artificial Sequence: targeting sequence/synthetic sequence
RFPECPEGSSISAPSQTSVD

SEQ ID NO: 10297 - protein, 20 aa, Artificial Sequence
  Description of Artificial Sequence: targeting sequence/synthetic sequence
VALAVILPVLVLLIMVCLCL

SEQ ID NO: 10298 - protein, 20 aa, Artificial Sequence
  Description of Artificial Sequence: targeting sequence/synthetic sequence
CSELTQSQASLQSASSVGSA

SEQ ID NO: 10299 - protein, 20 aa, Artificial Sequence
  Description of Artificial Sequence: targeting sequence/synthetic sequence
CQQILGQLQPALKTGTEDLQ

SEQ ID NO: 10300 - protein, 20 aa, Artificial Sequence
  Description of Artificial Sequence: targeting sequence/synthetic sequence
DEKIFVVSATGESQMLTRGQ

SEQ ID NO: 10301 - protein, 20 aa, Artificial Sequence
  Description of Artificial Sequence: targeting sequence/synthetic sequence
DVSMIQESDCGVGVEGKEGK

SEQ ID NO: 10302 - protein, 20 aa, Artificial Sequence
  Description of Artificial Sequence: targeting sequence/synthetic sequence
GERVAGQPVVLDVAAGGIDI

SEQ ID NO: 10303 - protein, 20 aa, Artificial Sequence
  Description of Artificial Sequence: targeting sequence/synthetic sequence
MGSSMPPSPSNGSSFSLPTN

SEQ ID NO: 10304 - protein, 20 aa, Artificial Sequence
  Description of Artificial Sequence: targeting sequence/synthetic sequence
FQLTQGDQLSTHTDGIPHLV

SEQ ID NO: 10305 - protein, 20 aa, Artificial Sequence
  Description of Artificial Sequence: targeting sequence/synthetic sequence
RCSELTQSQASLQSASSVGS

SEQ ID NO: 10306 - protein, 20 aa, Artificial Sequence
  Description of Artificial Sequence: targeting sequence/synthetic sequence
EIKMTKMYKGFQALGDAADI

SEQ ID NO: 10307 - protein, 20 aa, Artificial Sequence
  Description of Artificial Sequence: targeting sequence/synthetic sequence
QRIHFPSDKGHCVDLPDTGL

SEQ ID NO: 10308 - protein, 20 aa, Artificial Sequence
  Description of Artificial Sequence: targeting sequence/synthetic sequence
TRSQLLIMDRAADPVSPLLH

SEQ ID NO: 10309 - protein, 20 aa, Artificial Sequence
  Description of Artificial Sequence: targeting sequence/synthetic sequence
TTSALTPGPAAAAADAAASS

SEQ ID NO: 10310 - protein, 20 aa, Artificial Sequence
  Description of Artificial Sequence: targeting sequence/synthetic sequence
PVCGSDGVTYGSACELREAA

SEQ ID NO: 10311 - protein, 20 aa, Artificial Sequence
  Description of Artificial Sequence: targeting sequence/synthetic sequence
DGVEVHNAKTKPREEQYNST

SEQ ID NO: 10312 - protein, 20 aa, Artificial Sequence
  Description of Artificial Sequence: targeting sequence/synthetic sequence
RYEIKMTKMYKGFQALGDAA

SEQ ID NO: 10313 - protein, 20 aa, Artificial Sequence
  Description of Artificial Sequence: targeting sequence/synthetic sequence
KKLLVVDPKARFTTEEALRH

SEQ ID NO: 10314 - protein, 20 aa, Artificial Sequence
  Description of Artificial Sequence: targeting sequence/synthetic sequence
IQESDCGVGVEGKEGKQASL

SEQ ID NO: 10315 - protein, 20 aa, Artificial Sequence
  Description of Artificial Sequence: targeting sequence/synthetic sequence
TQPTIQPTQPTTQLPTDSPT

SEQ ID NO: 10316 - protein, 20 aa, Artificial Sequence
  Description of Artificial Sequence: targeting sequence/synthetic sequence
GESRGHSATQLPAEKTVGGP

SEQ ID NO: 10317 - protein, 20 aa, Artificial Sequence
  Description of Artificial Sequence: targeting sequence/synthetic sequence
LSPPPESSGSPQQPGLSAPH

SEQ ID NO: 10318 - protein, 20 aa, Artificial Sequence
  Description of Artificial Sequence: targeting sequence/synthetic sequence
VDGVEVHNAKTKPREEQFNS

SEQ ID NO: 10319 - protein, 20 aa, Artificial Sequence
  Description of Artificial Sequence: targeting sequence/synthetic sequence
ATNQDQVIKFTTEGATSQSY

SEQ ID NO: 10320 - protein, 20 aa, Artificial Sequence
  Description of Artificial Sequence: targeting sequence/synthetic sequence
RLLRILGRNDDDSSEAMNDI

SEQ ID NO: 10321 - protein, 20 aa, Artificial Sequence
  Description of Artificial Sequence: targeting sequence/synthetic sequence
VVFEDVKGTGGESRDLPSGQ

SEQ ID NO: 10322 - protein, 20 aa, Artificial Sequence
  Description of Artificial Sequence: targeting sequence/synthetic sequence
GAAMGAASLTLSAQSRTLFR

SEQ ID NO: 10323 - protein, 20 aa, Artificial Sequence
  Description of Artificial Sequence: targeting sequence/synthetic sequence
GTIEGLITTNVGDSTLADLL

SEQ ID NO: 10324 - protein, 20 aa, Artificial Sequence
  Description of Artificial Sequence: targeting sequence/synthetic sequence
PPGADGQPGAKGEPGDAGAK

SEQ ID NO: 10325 - protein, 20 aa, Artificial Sequence
  Description of Artificial Sequence: targeting sequence/synthetic sequence
SQPQDVDSVCSGTLQKTEDV

SEQ ID NO: 10326 - protein, 20 aa, Artificial Sequence
  Description of Artificial Sequence: targeting sequence/synthetic sequence
AKGDAGPAGPKGEPGSPGEN

SEQ ID NO: 10327 - protein, 20 aa, Artificial Sequence
  Description of Artificial Sequence: targeting sequence/synthetic sequence
FLGVLSAAGSTMGAAATTLA

SEQ ID NO: 10328 - protein, 20 aa, Artificial Sequence
  Description of Artificial Sequence: targeting sequence/synthetic sequence
AKGLSNPSEVETLREKVYAT

SEQ ID NO: 10329 - protein, 20 aa, Artificial Sequence
  Description of Artificial Sequence: targeting sequence/synthetic sequence
RIHFPSDKGHCVDLPDTGLC

SEQ ID NO: 10330 - protein, 20 aa, Artificial Sequence
  Description of Artificial Sequence: targeting sequence/synthetic sequence
SQSQGIQQLLQAEKRAAEKV

SEQ ID NO: 10331 - protein, 20 aa, Artificial Sequence
  Description of Artificial Sequence: targeting sequence/synthetic sequence
AAAPAPASVPQISQPPFLLD

SEQ ID NO: 10332 - protein, 20 aa, Artificial Sequence
  Description of Artificial Sequence: targeting sequence/synthetic sequence
ILFPATDASCEDKSAARGLA

SEQ ID NO: 10333 - protein, 20 aa, Artificial Sequence
  Description of Artificial Sequence: targeting sequence/synthetic sequence
SKESDSASDGITQAAALSIT

SEQ ID NO: 10334 - protein, 20 aa, Artificial Sequence
  Description of Artificial Sequence: targeting sequence/synthetic sequence
QCPDGRALGPAGCEADASAP

SEQ ID NO: 10335 - protein, 20 aa, Artificial Sequence
  Description of Artificial Sequence: targeting sequence/synthetic sequence
RTALLDAAGVASLLTTAEVV

SEQ ID NO: 10336 - protein, 20 aa, Artificial Sequence
  Description of Artificial Sequence: targeting sequence/synthetic sequence
PGADGVPGKDGPRGPTGPIG

SEQ ID NO: 10337 - protein, 20 aa, Artificial Sequence
  Description of Artificial Sequence: targeting sequence/synthetic sequence
TDARRSEDYELASVETEDSA

SEQ ID NO: 10338 - protein, 20 aa, Artificial Sequence
  Description of Artificial Sequence: targeting sequence/synthetic sequence
KKEMIMSDEAVEERRALIKR

SEQ ID NO: 10339 - protein, 20 aa, Artificial Sequence
  Description of Artificial Sequence: targeting sequence/synthetic sequence
QVEQTSLEPLQESPRPTGVW

SEQ ID NO: 10340 - protein, 20 aa, Artificial Sequence
  Description of Artificial Sequence: targeting sequence/synthetic sequence
IQRVAAGVLCELAQDKEAAE

SEQ ID NO: 10341 - protein, 20 aa, Artificial Sequence
  Description of Artificial Sequence: targeting sequence/synthetic sequence
RQGRTIILSTHHMDEADVLG

SEQ ID NO: 10342 - protein, 20 aa, Artificial Sequence
  Description of Artificial Sequence: targeting sequence/synthetic sequence
LSSRPTPRTSTAVEVSPGED

SEQ ID NO: 10343 - protein, 20 aa, Artificial Sequence
  Description of Artificial Sequence: targeting sequence/synthetic sequence
YPPVATNQDQVIKFTTEGAT

SEQ ID NO: 10344 - protein, 20 aa, Artificial Sequence
  Description of Artificial Sequence: targeting sequence/synthetic sequence
PLEFKRELTGQRLREGDGPD

SEQ ID NO: 10345 - protein, 20 aa, Artificial Sequence
  Description of Artificial Sequence: targeting sequence/synthetic sequence
GSPGGKGEMGPAGIPGAPGL

SEQ ID NO: 10346 - protein, 20 aa, Artificial Sequence
  Description of Artificial Sequence: targeting sequence/synthetic sequence
ISRTPEVTCVVVDVSHEDPE

SEQ ID NO: 10347 - protein, 20 aa, Artificial Sequence
  Description of Artificial Sequence: targeting sequence/synthetic sequence
IKFKGVDNEDDHGRGDLGRL

SEQ ID NO: 10348 - protein, 20 aa, Artificial Sequence
  Description of Artificial Sequence: targeting sequence/synthetic sequence
RFDLTQIPHGEAVTAAEFRI

SEQ ID NO: 10349 - protein, 20 aa, Artificial Sequence
  Description of Artificial Sequence: targeting sequence/synthetic sequence
KQGYISKESDSASDGITQAA

SEQ ID NO: 10350 - protein, 20 aa, Artificial Sequence
  Description of Artificial Sequence: targeting sequence/synthetic sequence
ALTPGPAAAAADAAASSVAK

SEQ ID NO: 10351 - protein, 20 aa, Artificial Sequence
  Description of Artificial Sequence: targeting sequence/synthetic sequence
FKFNLSQIPEGEVVTAAEFR

SEQ ID NO: 10352 - protein, 20 aa, Artificial Sequence
  Description of Artificial Sequence: targeting sequence/synthetic sequence
ILVQLQPALQTGTEEIKSLY

SEQ ID NO: 10353 - protein, 20 aa, Artificial Sequence
  Description of Artificial Sequence: targeting sequence/synthetic sequence
LPNIQAVLLPKKTESHHKAK

SEQ ID NO: 10354 - protein, 20 aa, Artificial Sequence
  Description of Artificial Sequence: targeting sequence/synthetic sequence
CPATCRGAPEGTVCGSDGAD

SEQ ID NO: 10355 - protein, 20 aa, Artificial Sequence
  Description of Artificial Sequence: targeting sequence/synthetic sequence
LCKDTEDIEQSANIQGDGIA

SEQ ID NO: 10356 - protein, 20 aa, Artificial Sequence
  Description of Artificial Sequence: targeting sequence/synthetic sequence
AHGVQTESSTVTPTLPGETL

SEQ ID NO: 10357 - protein, 20 aa, Artificial Sequence
  Description of Artificial Sequence: targeting sequence/synthetic sequence
ANKRMKVKHDDHYELIVDGR

SEQ ID NO: 10358 - protein, 20 aa, Artificial Sequence
  Description of Artificial Sequence: targeting sequence/synthetic sequence
TIEGLITTNVGDSTLADLLD

SEQ ID NO: 10359 - protein, 20 aa, Artificial Sequence
  Description of Artificial Sequence: targeting sequence/synthetic sequence
CDDTPNCPDASDEAACEKYT

SEQ ID NO: 10360 - protein, 20 aa, Artificial Sequence
  Description of Artificial Sequence: targeting sequence/synthetic sequence
YEGDALLAQLYRDKTAAEGA

SEQ ID NO: 10361 - protein, 20 aa, Artificial Sequence
  Description of Artificial Sequence: targeting sequence/synthetic sequence
HHKEFKFNLSQIPEGEVVTA

SEQ ID NO: 10362 - protein, 20 aa, Artificial Sequence
  Description of Artificial Sequence: targeting sequence/synthetic sequence
RGAPEGTVCGSDGADYPGEC

SEQ ID NO: 10363 - protein, 20 aa, Artificial Sequence
  Description of Artificial Sequence: targeting sequence/synthetic sequence
SRRFEETRGMEEEPTHLPLV

SEQ ID NO: 10364 - protein, 20 aa, Artificial Sequence
  Description of Artificial Sequence: targeting sequence/synthetic sequence
QGLPLSNFVPPPPSPAPSDS

SEQ ID NO: 10365 - protein, 20 aa, Artificial Sequence
  Description of Artificial Sequence: targeting sequence/synthetic sequence
PRHLQLAIRNDEELNKLLGR

SEQ ID NO: 10366 - protein, 20 aa, Artificial Sequence
  Description of Artificial Sequence: targeting sequence/synthetic sequence
YPGSPGLPGEKGDKGLPGLD

SEQ ID NO: 10367 - protein, 20 aa, Artificial Sequence
  Description of Artificial Sequence: targeting sequence/synthetic sequence
LRLLRILGRNDDDSSEAMND

SEQ ID NO: 10368 - protein, 20 aa, Artificial Sequence
  Description of Artificial Sequence: targeting sequence/synthetic sequence
LPGPPGPPGPPGPPGLGGNF

SEQ ID NO: 10369 - protein, 20 aa, Artificial Sequence
  Description of Artificial Sequence: targeting sequence/synthetic sequence
VKKLLVVDPKARFTTEEALR

SEQ ID NO: 10370 - protein, 20 aa, Artificial Sequence
  Description of Artificial Sequence: targeting sequence/synthetic sequence
IQAVLLPKKTESHHHKAQSK

SEQ ID NO: 10371 - protein, 20 aa, Artificial Sequence
  Description of Artificial Sequence: targeting sequence/synthetic sequence
PGCMLIQKQKPYTGEADDHH

SEQ ID NO: 10372 - protein, 20 aa, Artificial Sequence
  Description of Artificial Sequence: targeting sequence/synthetic sequence
NEDGGEKNMEDSGHETGIDS

SEQ ID NO: 10373 - protein, 20 aa, Artificial Sequence
  Description of Artificial Sequence: targeting sequence/synthetic sequence
GGLPPPQRTQRSTEILQDLT

SEQ ID NO: 10374 - protein, 20 aa, Artificial Sequence
  Description of Artificial Sequence: targeting sequence/synthetic sequence
RPTPRTSTAVEVSPGEDMTH

SEQ ID NO: 10375 - protein, 20 aa, Artificial Sequence
  Description of Artificial Sequence: targeting sequence/synthetic sequence
GIPGPQGSPGLPGDKGAKGE

SEQ ID NO: 10376 - protein, 20 aa, Artificial Sequence
  Description of Artificial Sequence: targeting sequence/synthetic sequence
CGQCPDGRALGPAGCEADAS

SEQ ID NO: 10377 - protein, 20 aa, Artificial Sequence
  Description of Artificial Sequence: targeting sequence/synthetic sequence
EDETVELDVSDEEMARRYET

SEQ ID NO: 10378 - protein, 20 aa, Artificial Sequence
  Description of Artificial Sequence: targeting sequence/synthetic sequence
SSRPTPRTSTAVEVSPGEDM

SEQ ID NO: 10379 - protein, 20 aa, Artificial Sequence
  Description of Artificial Sequence: targeting sequence/synthetic sequence
SVSMTVKSIVLEKELRLKET

SEQ ID NO: 10380 - protein, 20 aa, Artificial Sequence
  Description of Artificial Sequence: targeting sequence/synthetic sequence
PGTPGSRSRTPSLPTPPTRE

SEQ ID NO: 10381 - protein, 20 aa, Artificial Sequence
  Description of Artificial Sequence: targeting sequence/synthetic sequence
KFAIGSAREADPALNVETEI

SEQ ID NO: 10382 - protein, 20 aa, Artificial Sequence
  Description of Artificial Sequence: targeting sequence/synthetic sequence
TSIATTTTTTTESVEEVVRE

SEQ ID NO: 10383 - protein, 20 aa, Artificial Sequence
  Description of Artificial Sequence: targeting sequence/synthetic sequence
VRLLRDTPFITQQALYQNDP

SEQ ID NO: 10384 - protein, 20 aa, Artificial Sequence
  Description of Artificial Sequence: targeting sequence/synthetic sequence
GVLPNIQAVLLPKKTESHHK

SEQ ID NO: 10385 - protein, 20 aa, Artificial Sequence
  Description of Artificial Sequence: targeting sequence/synthetic sequence
RPYSIHAHGVQTESSTVTPT

SEQ ID NO: 10386 - protein, 20 aa, Artificial Sequence
  Description of Artificial Sequence: targeting sequence/synthetic sequence
GGVLPNIQAVLLPKKTSATV

SEQ ID NO: 10387 - protein, 20 aa, Artificial Sequence
  Description of Artificial Sequence: targeting sequence/synthetic sequence
TPRHILLAVANDEELNQLLK

SEQ ID NO: 10388 - protein, 20 aa, Artificial Sequence
  Description of Artificial Sequence: targeting sequence/synthetic sequence
LLGRMLVLDSDQRVSAAEAL

SEQ ID NO: 10389 - protein, 20 aa, Artificial Sequence
  Description of Artificial Sequence: targeting sequence/synthetic sequence
RRTTYKLQVKNEEVKNMSLE

SEQ ID NO: 10390 - protein, 20 aa, Artificial Sequence
  Description of Artificial Sequence: targeting sequence/synthetic sequence
PYSIHAHGVQTESSTVTPTL

SEQ ID NO: 10391 - protein, 20 aa, Artificial Sequence
  Description of Artificial Sequence: targeting sequence/synthetic sequence
ELRRTTYKLQVKNEEVKNMS

SEQ ID NO: 10392 - protein, 20 aa, Artificial Sequence
  Description of Artificial Sequence: targeting sequence/synthetic sequence
GVRGLHKSLTDVALEHHEEC

SEQ ID NO: 10393 - protein, 20 aa, Artificial Sequence
  Description of Artificial Sequence: targeting sequence/synthetic sequence
MGAASLTLSAQSRTLLAGIV

SEQ ID NO: 10394 - protein, 20 aa, Artificial Sequence
  Description of Artificial Sequence: targeting sequence/synthetic sequence
AVVKVKRNKPPLPSVQRLTE

SEQ ID NO: 10395 - protein, 20 aa, Artificial Sequence
  Description of Artificial Sequence: targeting sequence/synthetic sequence
LLDAAGVASLLTTAEVVVTE

SEQ ID NO: 10396 - protein, 20 aa, Artificial Sequence
  Description of Artificial Sequence: targeting sequence/synthetic sequence
GCRQILGQLQPSLKTGSEEI

SEQ ID NO: 10397 - protein, 20 aa, Artificial Sequence
  Description of Artificial Sequence: targeting sequence/synthetic sequence
IHAHGVQTESSTVTPTLPGE

SEQ ID NO: 10398 - protein, 20 aa, Artificial Sequence
  Description of Artificial Sequence: targeting sequence/synthetic sequence
FRVCLKPGLSEEAAESPCAL

SEQ ID NO: 10399 - protein, 20 aa, Artificial Sequence
  Description of Artificial Sequence: targeting sequence/synthetic sequence
RRSEDYELASVETEDSASEN

SEQ ID NO: 10400 - protein, 20 aa, Artificial Sequence
  Description of Artificial Sequence: targeting sequence/synthetic sequence
TPGCMLIQKQKPYTGEADDH

SEQ ID NO: 10401 - protein, 20 aa, Artificial Sequence
  Description of Artificial Sequence: targeting sequence/synthetic sequence
VGAKKRKPPLPSVTKLTEDR

SEQ ID NO: 10402 - protein, 20 aa, Artificial Sequence
  Description of Artificial Sequence: targeting sequence/synthetic sequence
LLAGLCCLVPVSLAEDPQGD

SEQ ID NO: 10403 - protein, 20 aa, Artificial Sequence
  Description of Artificial Sequence: targeting sequence/synthetic sequence
EFDGKSLVSVTKEGLELPED

SEQ ID NO: 10404 - protein, 20 aa, Artificial Sequence
  Description of Artificial Sequence: targeting sequence/synthetic sequence
LPGFAGNPGPPGLPGMKGDP

SEQ ID NO: 10405 - protein, 20 aa, Artificial Sequence
  Description of Artificial Sequence: targeting sequence/synthetic sequence
TTQPTIQPTQPTTQLPTDSP

SEQ ID NO: 10406 - protein, 20 aa, Artificial Sequence
  Description of Artificial Sequence: targeting sequence/synthetic sequence
CAMESRRFEETRGMEEEPTH

SEQ ID NO: 10407 - protein, 20 aa, Artificial Sequence
  Description of Artificial Sequence: targeting sequence/synthetic sequence
SLSPPPESSGSPQQPGLSAP

SEQ ID NO: 10408 - protein, 20 aa, Artificial Sequence
  Description of Artificial Sequence: targeting sequence/synthetic sequence
GTPGSRSRTPSLPTPPTREP

SEQ ID NO: 10409 - protein, 20 aa, Artificial Sequence
  Description of Artificial Sequence: targeting sequence/synthetic sequence
SNGQPENNYKTTPPVLDSDG

SEQ ID NO: 10410 - protein, 20 aa, Artificial Sequence
  Description of Artificial Sequence: targeting sequence/synthetic sequence
GEGGAPGLPGIAGPRGSPGE

SEQ ID NO: 10411 - protein, 20 aa, Artificial Sequence
  Description of Artificial Sequence: targeting sequence/synthetic sequence
PGRDGRDGTPGEKGEKGDPG

SEQ ID NO: 10412 - protein, 20 aa, Artificial Sequence
  Description of Artificial Sequence: targeting sequence/synthetic sequence
FDGKSLVSVTKEGLELPEDE

SEQ ID NO: 10413 - protein, 20 aa, Artificial Sequence
  Description of Artificial Sequence: targeting sequence/synthetic sequence
GCQQILVQLQPALQTGTQEI

SEQ ID NO: 10414 - protein, 20 aa, Artificial Sequence
  Description of Artificial Sequence: targeting sequence/synthetic sequence
EGCRQILGQLQSSLQTGSEE

SEQ ID NO: 10415 - protein, 20 aa, Artificial Sequence
  Description of Artificial Sequence: targeting sequence/synthetic sequence
CQKILRVLDPLVPTGSENLK

SEQ ID NO: 10416 - protein, 20 aa, Artificial Sequence
  Description of Artificial Sequence: targeting sequence/synthetic sequence
SSSLEPTPSSQEAQRALGTS

SEQ ID NO: 10417 - protein, 20 aa, Artificial Sequence
  Description of Artificial Sequence: targeting sequence/synthetic sequence
FFRVCLKPGLSEEAAESPCA

SEQ ID NO: 10418 - protein, 20 aa, Artificial Sequence
  Description of Artificial Sequence: targeting sequence/synthetic sequence
VEQTKQCKEEPKEEKVVKTE

SEQ ID NO: 10419 - protein, 20 aa, Artificial Sequence
  Description of Artificial Sequence: targeting sequence/synthetic sequence
GCVQIMKQLQPALTGTEELR

SEQ ID NO: 10420 - protein, 20 aa, Artificial Sequence
  Description of Artificial Sequence: targeting sequence/synthetic sequence
GVITLYEINYKAVGSLDPSA

SEQ ID NO: 10421 - protein, 20 aa, Artificial Sequence
  Description of Artificial Sequence: targeting sequence/synthetic sequence
NNIYCMAQLLDNSDTAEPTK

SEQ ID NO: 10422 - protein, 20 aa, Artificial Sequence
  Description of Artificial Sequence: targeting sequence/synthetic sequence
IIEIKPFSDGGDGSSSEQIR

SEQ ID NO: 10423 - protein, 20 aa, Artificial Sequence
  Description of Artificial Sequence: targeting sequence/synthetic sequence
EGCQKIISVLEPLVPTGSEN

SEQ ID NO: 10424 - protein, 20 aa, Artificial Sequence
  Description of Artificial Sequence: targeting sequence/synthetic sequence
PTKAGRGASQPPTPTPASDA

SEQ ID NO: 10425 - protein, 20 aa, Artificial Sequence
  Description of Artificial Sequence: targeting sequence/synthetic sequence
VMEIKFKGVDNEDDHGRGDL

SEQ ID NO: 10426 - protein, 20 aa, Artificial Sequence
  Description of Artificial Sequence: targeting sequence/synthetic sequence
TKAGRGASQPPTPTPASDAF

SEQ ID NO: 10427 - protein, 20 aa, Artificial Sequence
  Description of Artificial Sequence: targeting sequence/synthetic sequence
PSRACTCVPPHPQTAFCNSD

SEQ ID NO: 10428 - protein, 20 aa, Artificial Sequence
  Description of Artificial Sequence: targeting sequence/synthetic sequence
TDGHVAAGSTLARRKRSAGA

SEQ ID NO: 10429 - protein, 20 aa, Artificial Sequence
  Description of Artificial Sequence: targeting sequence/synthetic sequence
YMDYGCYCGAGGSGTPVDEL

SEQ ID NO: 10430 - protein, 20 aa, Artificial Sequence
  Description of Artificial Sequence: targeting sequence/synthetic sequence
LAGLCCLVPVSLAEDPQGDA

SEQ ID NO: 10431 - protein, 20 aa, Artificial Sequence
  Description of Artificial Sequence: targeting sequence/synthetic sequence
LRNNIYCMAQLLDNSDTAEP

SEQ ID NO: 10432 - protein, 20 aa, Artificial Sequence
  Description of Artificial Sequence: targeting sequence/synthetic sequence
KEGCQKIISVLEPLVPTGSE

SEQ ID NO: 10433 - protein, 20 aa, Artificial Sequence
  Description of Artificial Sequence: targeting sequence/synthetic sequence
DVGFAMGIAGTDVAKEASDI

SEQ ID NO: 10434 - protein, 20 aa, Artificial Sequence
  Description of Artificial Sequence: targeting sequence/synthetic sequence
FPGPPGPKGVDGLPGDMGPP

SEQ ID NO: 10435 - protein, 20 aa, Artificial Sequence
  Description of Artificial Sequence: targeting sequence/synthetic sequence
SQGIHQLLQAEKRAKDKLEE

SEQ ID NO: 10436 - protein, 20 aa, Artificial Sequence
  Description of Artificial Sequence: targeting sequence/synthetic sequence
TGESSSLEPTPSSQEAQRAL

SEQ ID NO: 10437 - protein, 20 aa, Artificial Sequence
  Description of Artificial Sequence: targeting sequence/synthetic sequence
ADEKIFVVSATGESQMLTRG

SEQ ID NO: 10438 - protein, 20 aa, Artificial Sequence
  Description of Artificial Sequence: targeting sequence/synthetic sequence
YSSYGCYCGAGGQGWPQDAS

SEQ ID NO: 10439 - protein, 20 aa, Artificial Sequence
  Description of Artificial Sequence: targeting sequence/synthetic sequence
SRMDSTGVSGRIQVPEETYL

SEQ ID NO: 10440 - protein, 20 aa, Artificial Sequence
  Description of Artificial Sequence: targeting sequence/synthetic sequence
EFKRELTGQRLREGDGPDGP

SEQ ID NO: 10441 - protein, 20 aa, Artificial Sequence
  Description of Artificial Sequence: targeting sequence/synthetic sequence
KELAELRESTSQMHTASSLE

SEQ ID NO: 10442 - protein, 20 aa, Artificial Sequence
  Description of Artificial Sequence: targeting sequence/synthetic sequence
ENIHEVMEIKFKGVDNEDDH

SEQ ID NO: 10443 - protein, 20 aa, Artificial Sequence
  Description of Artificial Sequence: targeting sequence/synthetic sequence
PAGQKGEPGSDGIPGSAGEK

SEQ ID NO: 10444 - protein, 20 aa, Artificial Sequence
  Description of Artificial Sequence: targeting sequence/synthetic sequence
EVMEIKFKGVDNEDDHGRGD

SEQ ID NO: 10445 - protein, 20 aa, Artificial Sequence
  Description of Artificial Sequence: targeting sequence/synthetic sequence
GSPGPKGDKGEPGGPGADGV

SEQ ID NO: 10446 - protein, 20 aa, Artificial Sequence
  Description of Artificial Sequence: targeting sequence/synthetic sequence
ADACSCSPVHPQQAFCNADV

SEQ ID NO: 10447 - protein, 20 aa, Artificial Sequence
  Description of Artificial Sequence: targeting sequence/synthetic sequence
IEIRTVSDGGDGSSSEEIRI

SEQ ID NO: 10448 - protein, 20 aa, Artificial Sequence
  Description of Artificial Sequence: targeting sequence/synthetic sequence
QGRTIILSTHHMDEADVLGD

SEQ ID NO: 10449 - protein, 20 aa, Artificial Sequence
  Description of Artificial Sequence: targeting sequence/synthetic sequence
SFTQGLPLSNFVPPPPSPAP

SEQ ID NO: 10450 - protein, 20 aa, Artificial Sequence
  Description of Artificial Sequence: targeting sequence/synthetic sequence
TQGLPLSNFVPPPPSPAPSD

SEQ ID NO: 10451 - protein, 20 aa, Artificial Sequence
  Description of Artificial Sequence: targeting sequence/synthetic sequence
PLSNFVPPPPSPAPSDSPAS

SEQ ID NO: 10452 - protein, 20 aa, Artificial Sequence
  Description of Artificial Sequence: targeting sequence/synthetic sequence
SNFVPPPPSPAPSDSPASPD

SEQ ID NO: 10453 - protein, 20 aa, Artificial Sequence
  Description of Artificial Sequence: targeting sequence/synthetic sequence
FVPPPPSPAPSDSPASPDED

SEQ ID NO: 10454 - protein, 20 aa, Artificial Sequence
  Description of Artificial Sequence: targeting sequence/synthetic sequence
PPPPSPAPSDSPASPDEDLQ

SEQ ID NO: 10455 - protein, 20 aa, Artificial Sequence
  Description of Artificial Sequence: targeting sequence/synthetic sequence
EPTTQPTTEPTTQPTIQPTQ

SEQ ID NO: 10456 - protein, 20 aa, Artificial Sequence
  Description of Artificial Sequence: targeting sequence/synthetic sequence
TQPTTEPTTQPTIQPTQPTT

SEQ ID NO: 10457 - protein, 20 aa, Artificial Sequence
  Description of Artificial Sequence: targeting sequence/synthetic sequence
SSNYINAALMDSHKQPAAFV

SEQ ID NO: 10458 - protein, 20 aa, Artificial Sequence
  Description of Artificial Sequence: targeting sequence/synthetic sequence
IVEKTKQTLASVSSGPKHTQ

SEQ ID NO: 10459 - protein, 20 aa, Artificial Sequence
  Description of Artificial Sequence: targeting sequence/synthetic sequence
FSGLSAELRNQLDVAKVSQQ

SEQ ID NO: 10460 - protein, 20 aa, Artificial Sequence
  Description of Artificial Sequence: targeting sequence/synthetic sequence
VEGKVQGLVPAGGSSSNSTR

SEQ ID NO: 10461 - protein, 20 aa, Artificial Sequence
  Description of Artificial Sequence: targeting sequence/synthetic sequence
PLTPANNLPDTQSSGPAHSK

SEQ ID NO: 10462 - protein, 20 aa, Artificial Sequence
  Description of Artificial Sequence: targeting sequence/synthetic sequence
PLSVGVQLQDVPRGQVVKGS

SEQ ID NO: 10463 - protein, 20 aa, Artificial Sequence
  Description of Artificial Sequence: targeting sequence/synthetic sequence
AKSENLVKSHVQLQNYSKVE

SEQ ID NO: 10464 - protein, 20 aa, Artificial Sequence
  Description of Artificial Sequence: targeting sequence/synthetic sequence
RRFVQNALNGNGDSNNMDRA

SEQ ID NO: 10465 - protein, 20 aa, Artificial Sequence
  Description of Artificial Sequence: targeting sequence/synthetic sequence
VQKLKQLPVIESQINTIEHS

SEQ ID NO: 10466 - protein, 20 aa, Artificial Sequence
  Description of Artificial Sequence: targeting sequence/synthetic sequence
SEKALQSNHFELSLRTEATQ

SEQ ID NO: 10467 - protein, 20 aa, Artificial Sequence
  Description of Artificial Sequence: targeting sequence/synthetic sequence
KPEENKIRQEDLTKIISSAQ

SEQ ID NO: 10468 - protein, 20 aa, Artificial Sequence
  Description of Artificial Sequence: targeting sequence/synthetic sequence
LLQGASKLQELHLSSNGLES

SEQ ID NO: 10469 - protein, 20 aa, Artificial Sequence
  Description of Artificial Sequence: targeting sequence/synthetic sequence
SIVNANTVLDDLNSRMPQSR

SEQ ID NO: 10470 - protein, 20 aa, Artificial Sequence
  Description of Artificial Sequence: targeting sequence/synthetic sequence
LSDNDTFAASEHGKRQNYPK

SEQ ID NO: 10471 - protein, 20 aa, Artificial Sequence
  Description of Artificial Sequence: targeting sequence/synthetic sequence
VMHSQSTNQLDVGNNPRVGT

SEQ ID NO: 10472 - protein, 20 aa, Artificial Sequence
  Description of Artificial Sequence: targeting sequence/synthetic sequence
DSKNSVHLQMNSLKTDDTAV

SEQ ID NO: 10473 - protein, 20 aa, Artificial Sequence
  Description of Artificial Sequence: targeting sequence/synthetic sequence
ANLLQGASKLQELHLSSNGL

SEQ ID NO: 10474 - protein, 20 aa, Artificial Sequence
  Description of Artificial Sequence: targeting sequence/synthetic sequence
SSKSANTITSFVDRGLDDLS

SEQ ID NO: 10475 - protein, 20 aa, Artificial Sequence
  Description of Artificial Sequence: targeting sequence/synthetic sequence
APANTYNNNIEGQAIVYQSK

SEQ ID NO: 10476 - protein, 20 aa, Artificial Sequence
  Description of Artificial Sequence: targeting sequence/synthetic sequence
LDNTIYTQNEGFNIASKNLK

SEQ ID NO: 10477 - protein, 20 aa, Artificial Sequence
  Description of Artificial Sequence: targeting sequence/synthetic sequence
FVQNALNGNGDSNNMDRAVK

SEQ ID NO: 10478 - protein, 20 aa, Artificial Sequence
  Description of Artificial Sequence: targeting sequence/synthetic sequence
GAGLVQINKSNGKETVVGRL

SEQ ID NO: 10479 - protein, 20 aa, Artificial Sequence
  Description of Artificial Sequence: targeting sequence/synthetic sequence
LSVGVQLQDVPRGQVVKGSV

SEQ ID NO: 10480 - protein, 20 aa, Artificial Sequence
  Description of Artificial Sequence: targeting sequence/synthetic sequence
RGLESQTKLVNGQSHISLSK

SEQ ID NO: 10481 - protein, 20 aa, Artificial Sequence
  Description of Artificial Sequence: targeting sequence/synthetic sequence
QSIDSGISSLSYNRNEVLAS

SEQ ID NO: 10482 - protein, 20 aa, Artificial Sequence
  Description of Artificial Sequence: targeting sequence/synthetic sequence
SQTKLVNGQSHISLSKAEFQ

SEQ ID NO: 10483 - protein, 20 aa, Artificial Sequence
  Description of Artificial Sequence: targeting sequence/synthetic sequence
GVGASGSFRLAKSDEPKKSV

SEQ ID NO: 10484 - protein, 20 aa, Artificial Sequence
  Description of Artificial Sequence: targeting sequence/synthetic sequence
AARPYSATAAAATGGMANVK

SEQ ID NO: 10485 - protein, 20 aa, Artificial Sequence
  Description of Artificial Sequence: targeting sequence/synthetic sequence
PYADQLRTQVNTQAEQLRRQ

SEQ ID NO: 10486 - protein, 20 aa, Artificial Sequence
  Description of Artificial Sequence: targeting sequence/synthetic sequence
LCSCKPGVAGPKCGQCPDGR

SEQ ID NO: 10487 - protein, 20 aa, Artificial Sequence
  Description of Artificial Sequence: targeting sequence/synthetic sequence
YPESKTPLTATLSKSGNTFR

SEQ ID NO: 10488 - protein, 20 aa, Artificial Sequence
  Description of Artificial Sequence: targeting sequence/synthetic sequence
AGTGIAGGVTGSLSLASSKS

SEQ ID NO: 10489 - protein, 20 aa, Artificial Sequence
  Description of Artificial Sequence: targeting sequence/synthetic sequence
ARPSNFLSASSPLPASAKGQ

SEQ ID NO: 10490 - protein, 20 aa, Artificial Sequence
  Description of Artificial Sequence: targeting sequence/synthetic sequence
VSLLQLGQETDKLKTRNRES

SEQ ID NO: 10491 - protein, 20 aa, Artificial Sequence
  Description of Artificial Sequence: targeting sequence/synthetic sequence
SGSRNGEENIIDNPYLRPVK

SEQ ID NO: 10492 - protein, 20 aa, Artificial Sequence
  Description of Artificial Sequence: targeting sequence/synthetic sequence
QDIANRLNIVSSAQGSGIDI

SEQ ID NO: 10493 - protein, 20 aa, Artificial Sequence
  Description of Artificial Sequence: targeting sequence/synthetic sequence
ESSNYINAALMDSHKQPAAF

SEQ ID NO: 10494 - protein, 20 aa, Artificial Sequence
  Description of Artificial Sequence: targeting sequence/synthetic sequence
PARPSNFLSASSPLPASAKG

SEQ ID NO: 10495 - protein, 20 aa, Artificial Sequence
  Description of Artificial Sequence: targeting sequence/synthetic sequence
FQDIANRLNIVSSAQGSGID

SEQ ID NO: 10496 - protein, 20 aa, Artificial Sequence
  Description of Artificial Sequence: targeting sequence/synthetic sequence
PPRKKSPNELVDDLFKGAKE

SEQ ID NO: 10497 - protein, 20 aa, Artificial Sequence
  Description of Artificial Sequence: targeting sequence/synthetic sequence
SRDNSKNTLSLQMNSLRVED

SEQ ID NO: 10498 - protein, 20 aa, Artificial Sequence
  Description of Artificial Sequence: targeting sequence/synthetic sequence
WLKQPESNLGIEIKALDENG

SEQ ID NO: 10499 - protein, 20 aa, Artificial Sequence
  Description of Artificial Sequence: targeting sequence/synthetic sequence
GTAVSKVLHLEGEVNKIKSA

SEQ ID NO: 10500 - protein, 20 aa, Artificial Sequence
  Description of Artificial Sequence: targeting sequence/synthetic sequence
AGSAMGAASLTVSAQSRTLL

SEQ ID NO: 10501 - protein, 20 aa, Artificial Sequence
  Description of Artificial Sequence: targeting sequence/synthetic sequence
IYSFPAPNVILTKPEVSEGT

SEQ ID NO: 10502 - protein, 20 aa, Artificial Sequence
  Description of Artificial Sequence: targeting sequence/synthetic sequence
AELRNQLDVAKVSQQLGLDA

SEQ ID NO: 10503 - protein, 20 aa, Artificial Sequence
  Description of Artificial Sequence: targeting sequence/synthetic sequence
NKLLGKVTIAQGGVLPNIQA

SEQ ID NO: 10504 - protein, 20 aa, Artificial Sequence
  Description of Artificial Sequence: targeting sequence/synthetic sequence
VAHNAILRASLPKDRSPEEY

SEQ ID NO: 10505 - protein, 20 aa, Artificial Sequence
  Description of Artificial Sequence: targeting sequence/synthetic sequence
EPARPSNFLSASSPLPASAK

SEQ ID NO: 10506 - protein, 20 aa, Artificial Sequence
  Description of Artificial Sequence: targeting sequence/synthetic sequence
KQTKGVGASGSFRLAKSDEP

SEQ ID NO: 10507 - protein, 20 aa, Artificial Sequence
  Description of Artificial Sequence: targeting sequence/synthetic sequence
KPCAPGTFSNTTSSTDICRP

SEQ ID NO: 10508 - protein, 20 aa, Artificial Sequence
  Description of Artificial Sequence: targeting sequence/synthetic sequence
SRSAVQESTGGKTQIAGLIG

SEQ ID NO: 10509 - protein, 20 aa, Artificial Sequence
  Description of Artificial Sequence: targeting sequence/synthetic sequence
LNVAHNAILRASLPKDRSPE

SEQ ID NO: 10510 - protein, 20 aa, Artificial Sequence
  Description of Artificial Sequence: targeting sequence/synthetic sequence
KLLGGVTIAQGGVLPNIQAV

SEQ ID NO: 10511 - protein, 20 aa, Artificial Sequence
  Description of Artificial Sequence: targeting sequence/synthetic sequence
MFLPATKNLLNEKNHGVLHT

SEQ ID NO: 10512 - protein, 20 aa, Artificial Sequence
  Description of Artificial Sequence: targeting sequence/synthetic sequence
SDLTGRQDTSRMSTSQIPGR

SEQ ID NO: 10513 - protein, 20 aa, Artificial Sequence
  Description of Artificial Sequence: targeting sequence/synthetic sequence
RSQVILGAHSITREEPTKQI

SEQ ID NO: 10514 - protein, 20 aa, Artificial Sequence
  Description of Artificial Sequence: targeting sequence/synthetic sequence
ADQLRTQVNTQAEQLRRQLT

SEQ ID NO: 10515 - protein, 20 aa, Artificial Sequence
  Description of Artificial Sequence: targeting sequence/synthetic sequence
RMSSSYPTGLADVKAGPAQT

SEQ ID NO: 10516 - protein, 20 aa, Artificial Sequence
  Description of Artificial Sequence: targeting sequence/synthetic sequence
RNGSMKAADNFLDPNKASSL

SEQ ID NO: 10517 - protein, 20 aa, Artificial Sequence
  Description of Artificial Sequence: targeting sequence/synthetic sequence
TSVFLKDNSVAAVHNKTDYI

SEQ ID NO: 10518 - protein, 20 aa, Artificial Sequence
  Description of Artificial Sequence: targeting sequence/synthetic sequence
SLLQLGQETDKLKTRNRESI

SEQ ID NO: 10519 - protein, 20 aa, Artificial Sequence
  Description of Artificial Sequence: targeting sequence/synthetic sequence
GTVKPNANRIALDFQRGNDV

SEQ ID NO: 10520 - protein, 20 aa, Artificial Sequence
  Description of Artificial Sequence: targeting sequence/synthetic sequence
VTKLKQLEMLENQIATIHQS

SEQ ID NO: 10521 - protein, 20 aa, Artificial Sequence
  Description of Artificial Sequence: targeting sequence/synthetic sequence
PRQTGALMASSPQDIKFQDL

SEQ ID NO: 10522 - protein, 20 aa, Artificial Sequence
  Description of Artificial Sequence: targeting sequence/synthetic sequence
KRVADIKESKEHVIANSGQF

SEQ ID NO: 10523 - protein, 20 aa, Artificial Sequence
  Description of Artificial Sequence: targeting sequence/synthetic sequence
VNPHVSSFQGSKRGLNSSFE

SEQ ID NO: 10524 - protein, 20 aa, Artificial Sequence
  Description of Artificial Sequence: targeting sequence/synthetic sequence
ATESRIPVSKSQPVTPEKHR

SEQ ID NO: 10525 - protein, 20 aa, Artificial Sequence
  Description of Artificial Sequence: targeting sequence/synthetic sequence
LNVINNAILRANLQKGENPS

SEQ ID NO: 10526 - protein, 20 aa, Artificial Sequence
  Description of Artificial Sequence: targeting sequence/synthetic sequence
YKVNVYAVTKENTIINPSEN

SEQ ID NO: 10527 - protein, 20 aa, Artificial Sequence
  Description of Artificial Sequence: targeting sequence/synthetic sequence
QAIMTSLQDLKIVPIDPTKN

SEQ ID NO: 10528 - protein, 20 aa, Artificial Sequence
  Description of Artificial Sequence: targeting sequence/synthetic sequence
TRANPMYNAVSNADLMDFKN

SEQ ID NO: 10529 - protein, 20 aa, Artificial Sequence
  Description of Artificial Sequence: targeting sequence/synthetic sequence
LQLTTGNGLFLSEGLKLVDK

SEQ ID NO: 10530 - protein, 20 aa, Artificial Sequence
  Description of Artificial Sequence: targeting sequence/synthetic sequence
LSRSAVQESTGGKTQIAGLI

SEQ ID NO: 10531 - protein, 20 aa, Artificial Sequence
  Description of Artificial Sequence: targeting sequence/synthetic sequence
VSLSDNDTFAASEHGKRQNY

SEQ ID NO: 10532 - protein, 20 aa, Artificial Sequence
  Description of Artificial Sequence: targeting sequence/synthetic sequence
TGIAGGVTGSLSLASSKSLL

SEQ ID NO: 10533 - protein, 20 aa, Artificial Sequence
  Description of Artificial Sequence: targeting sequence/synthetic sequence
KSISYTQQNYVSEVEQQNSK

SEQ ID NO: 10534 - protein, 20 aa, Artificial Sequence
  Description of Artificial Sequence: targeting sequence/synthetic sequence
ISKDLTNSHNEYTIINSIEQ

SEQ ID NO: 10535 - protein, 20 aa, Artificial Sequence
  Description of Artificial Sequence: targeting sequence/synthetic sequence
QTIPQISNRTLNTLVQDNSY

SEQ ID NO: 10536 - protein, 20 aa, Artificial Sequence
  Description of Artificial Sequence: targeting sequence/synthetic sequence
ETIDTVISNALQLSQPKPQK

SEQ ID NO: 10537 - protein, 20 aa, Artificial Sequence
  Description of Artificial Sequence: targeting sequence/synthetic sequence
GGYLLGSRKVSGGGVTKESA

SEQ ID NO: 10538 - protein, 20 aa, Artificial Sequence
  Description of Artificial Sequence: targeting sequence/synthetic sequence
FRGLESQTKLVNGQSHISLS

SEQ ID NO: 10539 - protein, 20 aa, Artificial Sequence
  Description of Artificial Sequence: targeting sequence/synthetic sequence
IVEKTKQTVASISSGPKHTQ

SEQ ID NO: 10540 - protein, 20 aa, Artificial Sequence
  Description of Artificial Sequence: targeting sequence/synthetic sequence
SRSHSSGSVLPLGELEGRRS

SEQ ID NO: 10541 - protein, 20 aa, Artificial Sequence
  Description of Artificial Sequence: targeting sequence/synthetic sequence
MAGSAMGATSLTLSAQSRTL

SEQ ID NO: 10542 - protein, 20 aa, Artificial Sequence
  Description of Artificial Sequence: targeting sequence/synthetic sequence
ATKNLLNEKNHGVLHTSVVL

SEQ ID NO: 10543 - protein, 20 aa, Artificial Sequence
  Description of Artificial Sequence: targeting sequence/synthetic sequence
GLAYPGVRTHGTLESVNGPK

SEQ ID NO: 10544 - protein, 20 aa, Artificial Sequence
  Description of Artificial Sequence: targeting sequence/synthetic sequence
KKLVLSSEKTVLTPATNHMG

SEQ ID NO: 10545 - protein, 20 aa, Artificial Sequence
  Description of Artificial Sequence: targeting sequence/synthetic sequence
QGIQLNTILPDARDPAFKAA

SEQ ID NO: 10546 - protein, 20 aa, Artificial Sequence
  Description of Artificial Sequence: targeting sequence/synthetic sequence
LLGFEANGANGSKAVARTAR

SEQ ID NO: 10547 - protein, 20 aa, Artificial Sequence
  Description of Artificial Sequence: targeting sequence/synthetic sequence
CSCKPGVAGPKCGQCPDGRA

SEQ ID NO: 10548 - protein, 20 aa, Artificial Sequence
  Description of Artificial Sequence: targeting sequence/synthetic sequence
TAVVLGGDAAEHNKVVTKDF

SEQ ID NO: 10549 - protein, 20 aa, Artificial Sequence
  Description of Artificial Sequence: targeting sequence/synthetic sequence
YADQLRTQVNTQAEQLRRQL

SEQ ID NO: 10550 - protein, 20 aa, Artificial Sequence
  Description of Artificial Sequence: targeting sequence/synthetic sequence
AKGANGAPGIAGAPGFPGAR

SEQ ID NO: 10551 - protein, 20 aa, Artificial Sequence
  Description of Artificial Sequence: targeting sequence/synthetic sequence
RPRQTGALMASSPQDIKFQD

SEQ ID NO: 10552 - protein, 20 aa, Artificial Sequence
  Description of Artificial Sequence: targeting sequence/synthetic sequence
SVSLLQLGQETDKLKTRNRE

SEQ ID NO: 10553 - protein, 20 aa, Artificial Sequence
  Description of Artificial Sequence: targeting sequence/synthetic sequence
SRDNTLQVDINGFTTGRRGD

SEQ ID NO: 10554 - protein, 20 aa, Artificial Sequence
  Description of Artificial Sequence: targeting sequence/synthetic sequence
QTEPARPSNFLSASSPLPAS

SEQ ID NO: 10555 - protein, 20 aa, Artificial Sequence
  Description of Artificial Sequence: targeting sequence/synthetic sequence
TESRIPVSKSQPVTPEKHRA

SEQ ID NO: 10556 - protein, 20 aa, Artificial Sequence
  Description of Artificial Sequence: targeting sequence/synthetic sequence
AGLVQINKSNGKETVVGRLN

SEQ ID NO: 10557 - protein, 20 aa, Artificial Sequence
  Description of Artificial Sequence: targeting sequence/synthetic sequence
QNWLKQPESNLGIEIKALDE

SEQ ID NO: 10558 - protein, 20 aa, Artificial Sequence
  Description of Artificial Sequence: targeting sequence/synthetic sequence
KTPLTATLSKSGNTFRPEVH

SEQ ID NO: 10559 - protein, 20 aa, Artificial Sequence
  Description of Artificial Sequence: targeting sequence/synthetic sequence
YGKRVADIKESKEHVIANSG

SEQ ID NO: 10560 - protein, 20 aa, Artificial Sequence
  Description of Artificial Sequence: targeting sequence/synthetic sequence
DNTLQVDINGFTTGRRGDLA

SEQ ID NO: 10561 - protein, 20 aa, Artificial Sequence
  Description of Artificial Sequence: targeting sequence/synthetic sequence
FLPATKNLLNEKNHGVLHTS

SEQ ID NO: 10562 - protein, 20 aa, Artificial Sequence
  Description of Artificial Sequence: targeting sequence/synthetic sequence
SAMGGASLTLSAQSRTLLAG

SEQ ID NO: 10563 - protein, 20 aa, Artificial Sequence
  Description of Artificial Sequence: targeting sequence/synthetic sequence
MQKGFVSINDNKHYFDDSGV

SEQ ID NO: 10564 - protein, 20 aa, Artificial Sequence
  Description of Artificial Sequence: targeting sequence/synthetic sequence
LLGSRKVSGGGVTKESAEKG

SEQ ID NO: 10565 - protein, 20 aa, Artificial Sequence
  Description of Artificial Sequence: targeting sequence/synthetic sequence
IKQAFQGAVQKELQHIVGSQ

SEQ ID NO: 10566 - protein, 20 aa, Artificial Sequence
  Description of Artificial Sequence: targeting sequence/synthetic sequence
CLRNESTGSLGTQGRLCNKT

SEQ ID NO: 10567 - protein, 20 aa, Artificial Sequence
  Description of Artificial Sequence: targeting sequence/synthetic sequence
SNALQLSQPKPQKQLTAQST

SEQ ID NO: 10568 - protein, 20 aa, Artificial Sequence
  Description of Artificial Sequence: targeting sequence/synthetic sequence
LMKKDYSTSKFNPSQEKDGK

SEQ ID NO: 10569 - protein, 20 aa, Artificial Sequence
  Description of Artificial Sequence: targeting sequence/synthetic sequence
AGSAMGATSLTLSAQSRTLL

SEQ ID NO: 10570 - protein, 20 aa, Artificial Sequence
  Description of Artificial Sequence: targeting sequence/synthetic sequence
ITNDRLGDSKLYINGNLIDK

SEQ ID NO: 10571 - protein, 20 aa, Artificial Sequence
  Description of Artificial Sequence: targeting sequence/synthetic sequence
TKGAGNMVNGLANNAEIDDS

SEQ ID NO: 10572 - protein, 20 aa, Artificial Sequence
  Description of Artificial Sequence: targeting sequence/synthetic sequence
NVRKQLNNANVYREGVATQT

SEQ ID NO: 10573 - protein, 20 aa, Artificial Sequence
  Description of Artificial Sequence: targeting sequence/synthetic sequence
QDTFPNQVTLTNIRNEPVIV

SEQ ID NO: 10574 - protein, 20 aa, Artificial Sequence
  Description of Artificial Sequence: targeting sequence/synthetic sequence
LAYPGVRTHGTLESVNGPKA

SEQ ID NO: 10575 - protein, 20 aa, Artificial Sequence
  Description of Artificial Sequence: targeting sequence/synthetic sequence
LKKALLIQGSNDVEIRAEGN

SEQ ID NO: 10576 - protein, 20 aa, Artificial Sequence
  Description of Artificial Sequence: targeting sequence/synthetic sequence
KQKAAQQAASSSGQGQQAQT

SEQ ID NO: 10577 - protein, 20 aa, Artificial Sequence
  Description of Artificial Sequence: targeting sequence/synthetic sequence
HTTNDTYMVAGTPGTYRTGT

SEQ ID NO: 10578 - protein, 20 aa, Artificial Sequence
  Description of Artificial Sequence: targeting sequence/synthetic sequence
RGSAGPPGATGFPGAAGRVG

SEQ ID NO: 10579 - protein, 20 aa, Artificial Sequence
  Description of Artificial Sequence: targeting sequence/synthetic sequence
VQLLVRAHQDTQRRTSMGGT

SEQ ID NO: 10580 - protein, 20 aa, Artificial Sequence
  Description of Artificial Sequence: targeting sequence/synthetic sequence
VIRDAVTYTEHAKRKTVTAM

SEQ ID NO: 10581 - protein, 20 aa, Artificial Sequence
  Description of Artificial Sequence: targeting sequence/synthetic sequence
ANTDANNIEGQAILYQNKFL

SEQ ID NO: 10582 - protein, 20 aa, Artificial Sequence
  Description of Artificial Sequence: targeting sequence/synthetic sequence
VKPNANRIALDFQRGNDVAF

SEQ ID NO: 10583 - protein, 20 aa, Artificial Sequence
  Description of Artificial Sequence: targeting sequence/synthetic sequence
AALSLSTLASPKGGSGTAGT

SEQ ID NO: 10584 - protein, 20 aa, Artificial Sequence
  Description of Artificial Sequence: targeting sequence/synthetic sequence
TIYSFPAPNVILTKPEVSEG

SEQ ID NO: 10585 - protein, 20 aa, Artificial Sequence
  Description of Artificial Sequence: targeting sequence/synthetic sequence
SVQDTFPNQVTLTNIRNEPV

SEQ ID NO: 10586 - protein, 20 aa, Artificial Sequence
  Description of Artificial Sequence: targeting sequence/synthetic sequence
DQSKYLMMYNDNKMVDSKDV

SEQ ID NO: 10587 - protein, 20 aa, Artificial Sequence
  Description of Artificial Sequence: targeting sequence/synthetic sequence
KGANGAPGIAGAPGFPGARG

SEQ ID NO: 10588 - protein, 20 aa, Artificial Sequence
  Description of Artificial Sequence: targeting sequence/synthetic sequence
KRSQVILGAHSITREEPTKQ

SEQ ID NO: 10589 - protein, 20 aa, Artificial Sequence
  Description of Artificial Sequence: targeting sequence/synthetic sequence
NYKVNVYAVTKENTIINPSE

SEQ ID NO: 10590 - protein, 20 aa, Artificial Sequence
  Description of Artificial Sequence: targeting sequence/synthetic sequence
QQSVQDTFPNNVILSSINRQ

SEQ ID NO: 10591 - protein, 20 aa, Artificial Sequence
  Description of Artificial Sequence: targeting sequence/synthetic sequence
THKGIPMAASNLSVNYPVGA

SEQ ID NO: 10592 - protein, 20 aa, Artificial Sequence
  Description of Artificial Sequence: targeting sequence/synthetic sequence
AKGARGSAGPPGATGFPGAA

SEQ ID NO: 10593 - protein, 20 aa, Artificial Sequence
  Description of Artificial Sequence: targeting sequence/synthetic sequence
DYGNFLANHTNPLTVSKIDT

SEQ ID NO: 10594 - protein, 20 aa, Artificial Sequence
  Description of Artificial Sequence: targeting sequence/synthetic sequence
VKNGTRGKITDLIKDLDSQT

SEQ ID NO: 10595 - protein, 20 aa, Artificial Sequence
  Description of Artificial Sequence: targeting sequence/synthetic sequence
YTQQNYVSEVEQQNSKSVLW

SEQ ID NO: 10596 - protein, 20 aa, Artificial Sequence
  Description of Artificial Sequence: targeting sequence/synthetic sequence
APANTDANNIEGQAILYQNK

SEQ ID NO: 10597 - protein, 20 aa, Artificial Sequence
  Description of Artificial Sequence: targeting sequence/synthetic sequence
STTYNPSLKSRVTLSLDTSK

SEQ ID NO: 10598 - protein, 20 aa, Artificial Sequence
  Description of Artificial Sequence: targeting sequence/synthetic sequence
VGPVGARGPAGPQGPRGDKG

SEQ ID NO: 10599 - protein, 20 aa, Artificial Sequence
  Description of Artificial Sequence: targeting sequence/synthetic sequence
KSLLAPGSGSGGASPLTSAQ

SEQ ID NO: 10600 - protein, 20 aa, Artificial Sequence
  Description of Artificial Sequence: targeting sequence/synthetic sequence
SKPAFSYTSSSTPTMTDNRK

SEQ ID NO: 10601 - protein, 20 aa, Artificial Sequence
  Description of Artificial Sequence: targeting sequence/synthetic sequence
IRKLTDMEAQLLNQTSRMDA

SEQ ID NO: 10602 - protein, 20 aa, Artificial Sequence
  Description of Artificial Sequence: targeting sequence/synthetic sequence
SAMGAASLTVSAQSRTLLAG

SEQ ID NO: 10603 - protein, 20 aa, Artificial Sequence
  Description of Artificial Sequence: targeting sequence/synthetic sequence
GGLAYPGVRTHGTLESVNGP

SEQ ID NO: 10604 - protein, 20 aa, Artificial Sequence
  Description of Artificial Sequence: targeting sequence/synthetic sequence
IQTIMNAIPDLKIVPIDPTK

SEQ ID NO: 10605 - protein, 20 aa, Artificial Sequence
  Description of Artificial Sequence: targeting sequence/synthetic sequence
KPNANRIALDFQRGNDVAFH

SEQ ID NO: 10606 - protein, 20 aa, Artificial Sequence
  Description of Artificial Sequence: targeting sequence/synthetic sequence
GTASSTGNLVVKDPTRVMVP

SEQ ID NO: 10607 - protein, 20 aa, Artificial Sequence
  Description of Artificial Sequence: targeting sequence/synthetic sequence
FAPANTYNNNIEGQAIVYQS

SEQ ID NO: 10608 - protein, 20 aa, Artificial Sequence
  Description of Artificial Sequence: targeting sequence/synthetic sequence
TTNDTYMVAGTPGTYRTGTS

SEQ ID NO: 10609 - protein, 20 aa, Artificial Sequence
  Description of Artificial Sequence: targeting sequence/synthetic sequence
YENQITAFLGHNGAGKTTTL

SEQ ID NO: 10610 - protein, 20 aa, Artificial Sequence
  Description of Artificial Sequence: targeting sequence/synthetic sequence
VGAVLEQGQLQNTLHAQLQS

SEQ ID NO: 10611 - protein, 20 aa, Artificial Sequence
  Description of Artificial Sequence: targeting sequence/synthetic sequence
KGIQKPKSGTQGNYDDDWKG

SEQ ID NO: 10612 - protein, 20 aa, Artificial Sequence
  Description of Artificial Sequence: targeting sequence/synthetic sequence
TATVLARSIAKEGFEKISKG

SEQ ID NO: 10613 - protein, 20 aa, Artificial Sequence
  Description of Artificial Sequence: targeting sequence/synthetic sequence
NEIKKRFQTTYGSRAQTALP

SEQ ID NO: 10614 - protein, 20 aa, Artificial Sequence
  Description of Artificial Sequence: targeting sequence/synthetic sequence
GNLKKALLIQGSNDVEIRAE

SEQ ID NO: 10615 - protein, 20 aa, Artificial Sequence
  Description of Artificial Sequence: targeting sequence/synthetic sequence
LKQKAAQQAASSSGQGQQAQ

SEQ ID NO: 10616 - protein, 20 aa, Artificial Sequence
  Description of Artificial Sequence: targeting sequence/synthetic sequence
YSSGHVHLSSENKFQNSAIL

SEQ ID NO: 10617 - protein, 20 aa, Artificial Sequence
  Description of Artificial Sequence: targeting sequence/synthetic sequence
HFGTASSTGNLVVKDPTRVM

SEQ ID NO: 10618 - protein, 20 aa, Artificial Sequence
  Description of Artificial Sequence: targeting sequence/synthetic sequence
MKKDYSTSKFNPSQEKDGKI

SEQ ID NO: 10619 - protein, 20 aa, Artificial Sequence
  Description of Artificial Sequence: targeting sequence/synthetic sequence
CVRNESTGSLGTQGRLCNKT

SEQ ID NO: 10620 - protein, 20 aa, Artificial Sequence
  Description of Artificial Sequence: targeting sequence/synthetic sequence
TQQNYVSEVEQQNSKSVLWG

SEQ ID NO: 10621 - protein, 20 aa, Artificial Sequence
  Description of Artificial Sequence: targeting sequence/synthetic sequence
SFTAVVLGGDAAEHNKVVTK

SEQ ID NO: 10622 - protein, 20 aa, Artificial Sequence
  Description of Artificial Sequence: targeting sequence/synthetic sequence
KGARGSAGPPGATGFPGAAG

SEQ ID NO: 10623 - protein, 20 aa, Artificial Sequence
  Description of Artificial Sequence: targeting sequence/synthetic sequence
TYNPSLKSRVTLSLDTSKNQ

SEQ ID NO: 10624 - protein, 20 aa, Artificial Sequence
  Description of Artificial Sequence: targeting sequence/synthetic sequence
GAVLEQGQLQNTLHAQLQSA

SEQ ID NO: 10625 - protein, 20 aa, Artificial Sequence
  Description of Artificial Sequence: targeting sequence/synthetic sequence
VGDGIYNNTMGHVHSHLQGE

SEQ ID NO: 10626 - protein, 20 aa, Artificial Sequence
  Description of Artificial Sequence: targeting sequence/synthetic sequence
SKDLTNSHNEYTIINSIEQN

SEQ ID NO: 10627 - protein, 20 aa, Artificial Sequence
  Description of Artificial Sequence: targeting sequence/synthetic sequence
LSQPKPQKQLTAQSTPSTSG

SEQ ID NO: 10628 - protein, 20 aa, Artificial Sequence
  Description of Artificial Sequence: targeting sequence/synthetic sequence
GKKLVLSSEKTVLTPATNHM

SEQ ID NO: 10629 - protein, 20 aa, Artificial Sequence
  Description of Artificial Sequence: targeting sequence/synthetic sequence
LSRSHSSGSVLPLGELEGRR

SEQ ID NO: 10630 - protein, 20 aa, Artificial Sequence
  Description of Artificial Sequence: targeting sequence/synthetic sequence
VQGLVPAGGSSSNSTREPPA

SEQ ID NO: 10631 - protein, 20 aa, Artificial Sequence
  Description of Artificial Sequence: targeting sequence/synthetic sequence
ILRGDFSSANNRDNTYNRVS

SEQ ID NO: 10632 - protein, 20 aa, Artificial Sequence
  Description of Artificial Sequence: targeting sequence/synthetic sequence
PCAPGTFSNTTSSTDICRPH

SEQ ID NO: 10633 - protein, 20 aa, Artificial Sequence
  Description of Artificial Sequence: targeting sequence/synthetic sequence
HRLQLDALQRGKGLSHGVPE

SEQ ID NO: 10634 - protein, 20 aa, Artificial Sequence
  Description of Artificial Sequence: targeting sequence/synthetic sequence
YTSVFLKDNSVAAVHNKTDY

SEQ ID NO: 10635 - protein, 20 aa, Artificial Sequence
  Description of Artificial Sequence: targeting sequence/synthetic sequence
LAARPYSATAAAATGGMANV

SEQ ID NO: 10636 - protein, 20 aa, Artificial Sequence
  Description of Artificial Sequence: targeting sequence/synthetic sequence
ENRPDARSAMNRHNNEAGRQ

SEQ ID NO: 10637 - protein, 20 aa, Artificial Sequence
  Description of Artificial Sequence: targeting sequence/synthetic sequence
QKGIQKPKSGTQGNYDDDWK

SEQ ID NO: 10638 - protein, 20 aa, Artificial Sequence
  Description of Artificial Sequence: targeting sequence/synthetic sequence
PGKKLVLSSEKTVLTPATNH

SEQ ID NO: 10639 - protein, 20 aa, Artificial Sequence
  Description of Artificial Sequence: targeting sequence/synthetic sequence
RKSLLAPGSGSGGASPLTSA

SEQ ID NO: 10640 - protein, 20 aa, Artificial Sequence
  Description of Artificial Sequence: targeting sequence/synthetic sequence
PGSSGTGGTATWKPGSSGPG

SEQ ID NO: 10641 - protein, 20 aa, Artificial Sequence
  Description of Artificial Sequence: targeting sequence/synthetic sequence
IRGQPSPLGAAVINGSQHPS

SEQ ID NO: 10642 - protein, 20 aa, Artificial Sequence
  Description of Artificial Sequence: targeting sequence/synthetic sequence
TKPPLPSVKKLTEDRWNKPQ

SEQ ID NO: 10643 - protein, 20 aa, Artificial Sequence
  Description of Artificial Sequence: targeting sequence/synthetic sequence
NKRSQVILGAHSITREEPTK

SEQ ID NO: 10644 - protein, 20 aa, Artificial Sequence
  Description of Artificial Sequence: targeting sequence/synthetic sequence
KTRNGSMKAADNFLDPNKAS

SEQ ID NO: 10645 - protein, 20 aa, Artificial Sequence
  Description of Artificial Sequence: targeting sequence/synthetic sequence
NDRLGDSKLYINGNLIDQKS

SEQ ID NO: 10646 - protein, 20 aa, Artificial Sequence
  Description of Artificial Sequence: targeting sequence/synthetic sequence
HSVDSVLTALQDSSKRKQLV

SEQ ID NO: 10647 - protein, 20 aa, Artificial Sequence
  Description of Artificial Sequence: targeting sequence/synthetic sequence
YFNTNTAEAATGWQTIDGKK

SEQ ID NO: 10648 - protein, 20 aa, Artificial Sequence
  Description of Artificial Sequence: targeting sequence/synthetic sequence
RVGAVLEQGQLQNTLHAQLQ

SEQ ID NO: 10649 - protein, 20 aa, Artificial Sequence
  Description of Artificial Sequence: targeting sequence/synthetic sequence
QAFQGAVQKELQHIVGSQHI

SEQ ID NO: 10650 - protein, 20 aa, Artificial Sequence
  Description of Artificial Sequence: targeting sequence/synthetic sequence
LRALNRVLHDEILNKPMETL

SEQ ID NO: 10651 - protein, 20 aa, Artificial Sequence
  Description of Artificial Sequence: targeting sequence/synthetic sequence
ASTPPDKFAANVANVSINKK

SEQ ID NO: 10652 - protein, 20 aa, Artificial Sequence
  Description of Artificial Sequence: targeting sequence/synthetic sequence
LGTVKPNANRIALDFQRGND

SEQ ID NO: 10653 - protein, 20 aa, Artificial Sequence
  Description of Artificial Sequence: targeting sequence/synthetic sequence
RGQPSPLGAAVINGSQHPSS

SEQ ID NO: 10654 - protein, 20 aa, Artificial Sequence
  Description of Artificial Sequence: targeting sequence/synthetic sequence
NFLANHTNPLTVSKIDTEMR

SEQ ID NO: 10655 - protein, 20 aa, Artificial Sequence
  Description of Artificial Sequence: targeting sequence/synthetic sequence
FGIYNSRLSEVNIAQNNDII

SEQ ID NO: 10656 - protein, 20 aa, Artificial Sequence
  Description of Artificial Sequence: targeting sequence/synthetic sequence
TVLARSIAKEGFEKISKGAN

SEQ ID NO: 10657 - protein, 20 aa, Artificial Sequence
  Description of Artificial Sequence: targeting sequence/synthetic sequence
STMGAASVTLTVQARQLMSG

SEQ ID NO: 10658 - protein, 20 aa, Artificial Sequence
  Description of Artificial Sequence: targeting sequence/synthetic sequence
PTGSFMMVNSSGRASGQKAH

SEQ ID NO: 10659 - protein, 20 aa, Artificial Sequence
  Description of Artificial Sequence: targeting sequence/synthetic sequence
KPAFSYTSSSTPTMTDNRKG

SEQ ID NO: 10660 - protein, 20 aa, Artificial Sequence
  Description of Artificial Sequence: targeting sequence/synthetic sequence
NNRGQSIKLNPKIIDSIPDK

SEQ ID NO: 10661 - protein, 20 aa, Artificial Sequence
  Description of Artificial Sequence: targeting sequence/synthetic sequence
LLVRAHQDTQRRTSMGGTQQ

SEQ ID NO: 10662 - protein, 20 aa, Artificial Sequence
  Description of Artificial Sequence: targeting sequence/synthetic sequence
TALSRSAVQESTGGKTQIAG

SEQ ID NO: 10663 - protein, 20 aa, Artificial Sequence
  Description of Artificial Sequence: targeting sequence/synthetic sequence
AKGEVGPAGSPGSNGAPGQR

SEQ ID NO: 10664 - protein, 20 aa, Artificial Sequence
  Description of Artificial Sequence: targeting sequence/synthetic sequence
KLQETSNWLLSQQQADGSFQ

SEQ ID NO: 10665 - protein, 20 aa, Artificial Sequence
  Description of Artificial Sequence: targeting sequence/synthetic sequence
DSQLQLTTGNGLFLSEGLKL

SEQ ID NO: 10666 - protein, 20 aa, Artificial Sequence
  Description of Artificial Sequence: targeting sequence/synthetic sequence
RDIQDENQLLVADVKRLGKQ

SEQ ID NO: 10667 - protein, 20 aa, Artificial Sequence
  Description of Artificial Sequence: targeting sequence/synthetic sequence
QRVGAVLEQGQLQNTLHAQL

SEQ ID NO: 10668 - protein, 20 aa, Artificial Sequence
  Description of Artificial Sequence: targeting sequence/synthetic sequence
RALNRVLHDEILNKPMETLK

SEQ ID NO: 10669 - protein, 20 aa, Artificial Sequence
  Description of Artificial Sequence: targeting sequence/synthetic sequence
PGLPGTKGTRGPPGASGYPG

SEQ ID NO: 10670 - protein, 20 aa, Artificial Sequence
  Description of Artificial Sequence: targeting sequence/synthetic sequence
LGFEANGANGSKAVARTARK

SEQ ID NO: 10671 - protein, 20 aa, Artificial Sequence
  Description of Artificial Sequence: targeting sequence/synthetic sequence
GDKGAKGEKGQAGPPGIGIP

SEQ ID NO: 10672 - protein, 20 aa, Artificial Sequence
  Description of Artificial Sequence: targeting sequence/synthetic sequence
SQMLKHAVVNLINYQDDAEL

SEQ ID NO: 10673 - protein, 20 aa, Artificial Sequence
  Description of Artificial Sequence: targeting sequence/synthetic sequence
LRMSSSYPTGLADVKAGPAQ

SEQ ID NO: 10674 - protein, 20 aa, Artificial Sequence
  Description of Artificial Sequence: targeting sequence/synthetic sequence
NFQDIANRLNIVSSAQGSGI

SEQ ID NO: 10675 - protein, 20 aa, Artificial Sequence
  Description of Artificial Sequence: targeting sequence/synthetic sequence
VQESVQDTFPNQVTLTNIRN

SEQ ID NO: 10676 - protein, 20 aa, Artificial Sequence
  Description of Artificial Sequence: targeting sequence/synthetic sequence
QETSNWLLSQQQADGSFQDP

SEQ ID NO: 10677 - protein, 20 aa, Artificial Sequence
  Description of Artificial Sequence: targeting sequence/synthetic sequence
AVPTGSFMMVNSSGRASGQK

SEQ ID NO: 10678 - protein, 20 aa, Artificial Sequence
  Description of Artificial Sequence: targeting sequence/synthetic sequence
QTRGTGASGSFKLSKKVIPK

SEQ ID NO: 10679 - protein, 20 aa, Artificial Sequence
  Description of Artificial Sequence: targeting sequence/synthetic sequence
ATNHFGTASSTGNLVVKDPT

SEQ ID NO: 10680 - protein, 20 aa, Artificial Sequence
  Description of Artificial Sequence: targeting sequence/synthetic sequence
NRGQSIKLNPKIIDSIPDKG

SEQ ID NO: 10681 - protein, 20 aa, Artificial Sequence
  Description of Artificial Sequence: targeting sequence/synthetic sequence
TTLSLSTLATPKRSGNNNGS

SEQ ID NO: 10682 - protein, 20 aa, Artificial Sequence
  Description of Artificial Sequence: targeting sequence/synthetic sequence
KGFVSINDNKHYFDDSGVMK

SEQ ID NO: 10683 - protein, 20 aa, Artificial Sequence
  Description of Artificial Sequence: targeting sequence/synthetic sequence
GAKGEKGQAGPPGIGIPGLR

SEQ ID NO: 10684 - protein, 20 aa, Artificial Sequence
  Description of Artificial Sequence: targeting sequence/synthetic sequence
GTGGTATWKPGSSGPGSTGS

SEQ ID NO: 10685 - protein, 20 aa, Artificial Sequence
  Description of Artificial Sequence: targeting sequence/synthetic sequence
HKGIPMAASNLSVNYPVGAP

SEQ ID NO: 10686 - protein, 20 aa, Artificial Sequence
  Description of Artificial Sequence: targeting sequence/synthetic sequence
RPDARSAMNKHNNEAGRTTI

SEQ ID NO: 10687 - protein, 20 aa, Artificial Sequence
  Description of Artificial Sequence: targeting sequence/synthetic sequence
KSVNGQIESLISPDGSRKNP

SEQ ID NO: 10688 - protein, 20 aa, Artificial Sequence
  Description of Artificial Sequence: targeting sequence/synthetic sequence
GDGIYNNTMGHVHSHLQGEV

SEQ ID NO: 10689 - protein, 20 aa, Artificial Sequence
  Description of Artificial Sequence: targeting sequence/synthetic sequence
TDANNIEGQAIRYQNRFLHL

SEQ ID NO: 10690 - protein, 20 aa, Artificial Sequence
  Description of Artificial Sequence: targeting sequence/synthetic sequence
KYLMMYNDNKMVDSKDVKIE

SEQ ID NO: 10691 - protein, 20 aa, Artificial Sequence
  Description of Artificial Sequence: targeting sequence/synthetic sequence
AQGGVLPNIQAVLLPKKTES

SEQ ID NO: 10692 - protein, 20 aa, Artificial Sequence
  Description of Artificial Sequence: targeting sequence/synthetic sequence
VKAVILGGDPSSGARVVTGK

SEQ ID NO: 10693 - protein, 20 aa, Artificial Sequence
  Description of Artificial Sequence: targeting sequence/synthetic sequence
LRTQVNTQAEQLRRQLTPYA

SEQ ID NO: 10694 - protein, 20 aa, Artificial Sequence
  Description of Artificial Sequence: targeting sequence/synthetic sequence
KYFAPANTVNDNIYGQAVEY

SEQ ID NO: 10695 - protein, 20 aa, Artificial Sequence
  Description of Artificial Sequence: targeting sequence/synthetic sequence
RGQSIKLNPKIIDSIPDKGL

SEQ ID NO: 10696 - protein, 20 aa, Artificial Sequence
  Description of Artificial Sequence: targeting sequence/synthetic sequence
IGYISHSGSTTYNPSLKSRV

SEQ ID NO: 10697 - protein, 20 aa, Artificial Sequence
  Description of Artificial Sequence: targeting sequence/synthetic sequence
YYKLRTEGDGVYTLNDKKQW

SEQ ID NO: 10698 - protein, 20 aa, Artificial Sequence
  Description of Artificial Sequence: targeting sequence/synthetic sequence
YYFNTNTAEAATGWQTIDGK

SEQ ID NO: 10699 - protein, 20 aa, Artificial Sequence
  Description of Artificial Sequence: targeting sequence/synthetic sequence
ARGSAGPPGATGFPGAAGRV

SEQ ID NO: 10700 - protein, 20 aa, Artificial Sequence
  Description of Artificial Sequence: targeting sequence/synthetic sequence
QLLVRAHQDTQRRTSMGGTQ

SEQ ID NO: 10701 - protein, 20 aa, Artificial Sequence
  Description of Artificial Sequence: targeting sequence/synthetic sequence
DGRYGMDVWGQGTTVTVSSG

SEQ ID NO: 10702 - protein, 20 aa, Artificial Sequence
  Description of Artificial Sequence: targeting sequence/synthetic sequence
LVNKGILVQTRGTGASGSFK

SEQ ID NO: 10703 - protein, 20 aa, Artificial Sequence
  Description of Artificial Sequence: targeting sequence/synthetic sequence
TGSFMMVNSSGRASGQKAHL

SEQ ID NO: 10704 - protein, 20 aa, Artificial Sequence
  Description of Artificial Sequence: targeting sequence/synthetic sequence
HTTTLSLSTLATPKRSGNNN

SEQ ID NO: 10705 - protein, 20 aa, Artificial Sequence
  Description of Artificial Sequence: targeting sequence/synthetic sequence
KKALKLMGSNEGEFKAEGNS

SEQ ID NO: 10706 - protein, 20 aa, Artificial Sequence
  Description of Artificial Sequence: targeting sequence/synthetic sequence
GSQTFVNPHVSSFQGSKRGL

SEQ ID NO: 10707 - protein, 20 aa, Artificial Sequence
  Description of Artificial Sequence: targeting sequence/synthetic sequence
SQTFVNPHVSSFQGSKRGLN

SEQ ID NO: 10708 - protein, 20 aa, Artificial Sequence
  Description of Artificial Sequence: targeting sequence/synthetic sequence
KLTDMEAQLLNQTSRMDAQM

SEQ ID NO: 10709 - protein, 20 aa, Artificial Sequence
  Description of Artificial Sequence: targeting sequence/synthetic sequence
YYKLRTEGDGVYTLNNEKQW

SEQ ID NO: 10710 - protein, 20 aa, Artificial Sequence
  Description of Artificial Sequence: targeting sequence/synthetic sequence
FNVRKQLNNANVYREGVATQ

SEQ ID NO: 10711 - protein, 20 aa, Artificial Sequence
  Description of Artificial Sequence: targeting sequence/synthetic sequence
MGPRGAPGERGRPGLPGAAG

SEQ ID NO: 10712 - protein, 20 aa, Artificial Sequence
  Description of Artificial Sequence: targeting sequence/synthetic sequence
LSIKRLVTTGVLKQTKGVGA

SEQ ID NO: 10713 - protein, 20 aa, Artificial Sequence
  Description of Artificial Sequence: targeting sequence/synthetic sequence
WDGSLSPQAATVLFLHATQK

SEQ ID NO: 10714 - protein, 20 aa, Artificial Sequence
  Description of Artificial Sequence: targeting sequence/synthetic sequence
MGPRGLPGERGRPGAPGPAG

SEQ ID NO: 10715 - protein, 20 aa, Artificial Sequence
  Description of Artificial Sequence: targeting sequence/synthetic sequence
RGGVKRISGLIYEETRGVLK

SEQ ID NO: 10716 - protein, 20 aa, Artificial Sequence
  Description of Artificial Sequence: targeting sequence/synthetic sequence
FYENQITAFLGHNGAGKTTT

SEQ ID NO: 10717 - protein, 20 aa, Artificial Sequence
  Description of Artificial Sequence: targeting sequence/synthetic sequence
FLNEIKKRFQTTYGSRAQTA

SEQ ID NO: 10718 - protein, 20 aa, Artificial Sequence
  Description of Artificial Sequence: targeting sequence/synthetic sequence
GSFMMVNSSGRASGQKAHLL

SEQ ID NO: 10719 - protein, 20 aa, Artificial Sequence
  Description of Artificial Sequence: targeting sequence/synthetic sequence
IGGYLLGSRKVSGGGVTKES

SEQ ID NO: 10720 - protein, 20 aa, Artificial Sequence
  Description of Artificial Sequence: targeting sequence/synthetic sequence
PNKFNTLVGEKGAQMSGGQK

SEQ ID NO: 10721 - protein, 20 aa, Artificial Sequence
  Description of Artificial Sequence: targeting sequence/synthetic sequence
FCMKNEKVGSHGTQDRQCNK

SEQ ID NO: 10722 - protein, 20 aa, Artificial Sequence
  Description of Artificial Sequence: targeting sequence/synthetic sequence
KAVILGGDPSSGARVVTGKV

SEQ ID NO: 10723 - protein, 20 aa, Artificial Sequence
  Description of Artificial Sequence: targeting sequence/synthetic sequence
NRPDARSAMNRHNNEAGRQA

SEQ ID NO: 10724 - protein, 20 aa, Artificial Sequence
  Description of Artificial Sequence: targeting sequence/synthetic sequence
GIGGYLLGSRKVSGGGVTKE

SEQ ID NO: 10725 - protein, 20 aa, Artificial Sequence
  Description of Artificial Sequence: targeting sequence/synthetic sequence
RPDARSAMNRHNNEAGRQAI

SEQ ID NO: 10726 - protein, 20 aa, Artificial Sequence
  Description of Artificial Sequence: targeting sequence/synthetic sequence
STSWDGSLSPQAATVLFLHA

SEQ ID NO: 10727 - protein, 20 aa, Artificial Sequence
  Description of Artificial Sequence: targeting sequence/synthetic sequence
IAQGGVLPNIQAVLLPKKTS

SEQ ID NO: 10728 - protein, 20 aa, Artificial Sequence
  Description of Artificial Sequence: targeting sequence/synthetic sequence
QMLKHAVVNLINYQDDAELA

SEQ ID NO: 10729 - protein, 20 aa, Artificial Sequence
  Description of Artificial Sequence: targeting sequence/synthetic sequence
SGHVHLSSENKFQNSAILTI

SEQ ID NO: 10730 - protein, 20 aa, Artificial Sequence
  Description of Artificial Sequence: targeting sequence/synthetic sequence
NWGREERQSVFPFESGKPFK

SEQ ID NO: 10731 - protein, 20 aa, Artificial Sequence
  Description of Artificial Sequence: targeting sequence/synthetic sequence
IPSSHTLMKGGSTKYWSGNS

SEQ ID NO: 10732 - protein, 20 aa, Artificial Sequence
  Description of Artificial Sequence: targeting sequence/synthetic sequence
REERQSVFPFESGKPFKIQV

SEQ ID NO: 10733 - protein, 20 aa, Artificial Sequence
  Description of Artificial Sequence: targeting sequence/synthetic sequence
TLMGRLEDGSPRTGQIFKQT

SEQ ID NO: 10734 - protein, 20 aa, Artificial Sequence
  Description of Artificial Sequence: targeting sequence/synthetic sequence
TRGKITDLIKDLDSQTMMVL

SEQ ID NO: 10735 - protein, 20 aa, Artificial Sequence
  Description of Artificial Sequence: targeting sequence/synthetic sequence
KGTRGPPGASGYPGNPGLPG

SEQ ID NO: 10736 - protein, 20 aa, Artificial Sequence
  Description of Artificial Sequence: targeting sequence/synthetic sequence
NKFNTLVGEKGAQMSGGQKQ

SEQ ID NO: 10737 - protein, 20 aa, Artificial Sequence
  Description of Artificial Sequence: targeting sequence/synthetic sequence
VTIYSFPAPNVILTKPEVSE

SEQ ID NO: 10738 - protein, 20 aa, Artificial Sequence
  Description of Artificial Sequence: targeting sequence/synthetic sequence
IQMLMGRLEDGSHLTGQTLK

SEQ ID NO: 10739 - protein, 20 aa, Artificial Sequence
  Description of Artificial Sequence: targeting sequence/synthetic sequence
PSSHTLMKGGSTKYWSGNSE

SEQ ID NO: 10740 - protein, 20 aa, Artificial Sequence
  Description of Artificial Sequence: targeting sequence/synthetic sequence
GDIYYYGMDVWGQGTTVTVS

SEQ ID NO: 10741 - protein, 20 aa, Artificial Sequence
  Description of Artificial Sequence: targeting sequence/synthetic sequence
LQSAKDNNIKFRAIGHSDNS

SEQ ID NO: 10742 - protein, 20 aa, Artificial Sequence
  Description of Artificial Sequence: targeting sequence/synthetic sequence
GLVPAGGSSSNSTREPPASG

SEQ ID NO: 10743 - protein, 20 aa, Artificial Sequence
  Description of Artificial Sequence: targeting sequence/synthetic sequence
SLPTTNSTTNSATKITANTT

SEQ ID NO: 10744 - protein, 20 aa, Artificial Sequence
  Description of Artificial Sequence: targeting sequence/synthetic sequence
ERPASRANTVRSFHHEEHLE

SEQ ID NO: 10745 - protein, 20 aa, Artificial Sequence
  Description of Artificial Sequence: targeting sequence/synthetic sequence
LITQEPKEANSTTSQKQSKQ

SEQ ID NO: 10746 - protein, 20 aa, Artificial Sequence
  Description of Artificial Sequence: targeting sequence/synthetic sequence
MIQTLTNKSKIQNVGGTYEL

SEQ ID NO: 10747 - protein, 20 aa, Artificial Sequence
  Description of Artificial Sequence: targeting sequence/synthetic sequence
NSNAIKNLPPPLGGAAGHPG

SEQ ID NO: 10748 - protein, 20 aa, Artificial Sequence
  Description of Artificial Sequence: targeting sequence/synthetic sequence
RMDIDVVEKTNKIKDRYWDS

SEQ ID NO: 10749 - protein, 20 aa, Artificial Sequence
  Description of Artificial Sequence: targeting sequence/synthetic sequence
WVDDQEVINKASNSNKIRLE

SEQ ID NO: 10750 - protein, 20 aa, Artificial Sequence
  Description of Artificial Sequence: targeting sequence/synthetic sequence
LEVSSLPTTNSTTNSATKIT

SEQ ID NO: 10751 - protein, 20 aa, Artificial Sequence
  Description of Artificial Sequence: targeting sequence/synthetic sequence
IDVVEKTNKIKDRYWDSGPR

SEQ ID NO: 10752 - protein, 20 aa, Artificial Sequence
  Description of Artificial Sequence: targeting sequence/synthetic sequence
RWNRQSSTSVIETNKTSVEL

SEQ ID NO: 10753 - protein, 20 aa, Artificial Sequence
  Description of Artificial Sequence: targeting sequence/synthetic sequence
LPTTNSTTNSATKITANTTD

SEQ ID NO: 10754 - protein, 20 aa, Artificial Sequence
  Description of Artificial Sequence: targeting sequence/synthetic sequence
VTNNVKDVTKLVANLPKDYM

SEQ ID NO: 10755 - protein, 20 aa, Artificial Sequence
  Description of Artificial Sequence: targeting sequence/synthetic sequence
NRVTNNVKDVTKLVANLPKD

SEQ ID NO: 10756 - protein, 20 aa, Artificial Sequence
  Description of Artificial Sequence: targeting sequence/synthetic sequence
TWLVRHTENVTKTKTPEDYA

SEQ ID NO: 10757 - protein, 20 aa, Artificial Sequence
  Description of Artificial Sequence: targeting sequence/synthetic sequence
WLVRHTENVTKTKTPEDYAD

SEQ ID NO: 10758 - protein, 20 aa, Artificial Sequence
  Description of Artificial Sequence: targeting sequence/synthetic sequence
IDQEELNKTKPIWTRNPDDI

SEQ ID NO: 10759 - protein, 20 aa, Artificial Sequence
  Description of Artificial Sequence: targeting sequence/synthetic sequence
EKYIDQEELNKTKPIWTRNP

SEQ ID NO: 10760 - protein, 20 aa, Artificial Sequence
  Description of Artificial Sequence: targeting sequence/synthetic sequence
EQLITQEPKEANSTTSQKQS

SEQ ID NO: 10761 - protein, 20 aa, Artificial Sequence
  Description of Artificial Sequence: targeting sequence/synthetic sequence
QTLTNKSKIQNVGGTYELHV

SEQ ID NO: 10762 - protein, 20 aa, Artificial Sequence
  Description of Artificial Sequence: targeting sequence/synthetic sequence
MWVDDQEVINKASNSNKIRL

SEQ ID NO: 10763 - protein, 20 aa, Artificial Sequence
  Description of Artificial Sequence: targeting sequence/synthetic sequence
LERAASRANTVRSFHHEESL

SEQ ID NO: 10764 - protein, 20 aa, Artificial Sequence
  Description of Artificial Sequence: targeting sequence/synthetic sequence
VGAATSRDALPNTEASGPTH

SEQ ID NO: 10765 - protein, 20 aa, Artificial Sequence
  Description of Artificial Sequence: targeting sequence/synthetic sequence
IQTLTNKSKIQNVGGTYELH

SEQ ID NO: 10766 - protein, 20 aa, Artificial Sequence
  Description of Artificial Sequence: targeting sequence/synthetic sequence
LGAAGSTMGAAAVTLTVQAR

SEQ ID NO: 10767 - protein, 20 aa, Artificial Sequence
  Description of Artificial Sequence: targeting sequence/synthetic sequence
VLSAAGSTMGAAATALTVRT

SEQ ID NO: 10768 - protein, 20 aa, Artificial Sequence
  Description of Artificial Sequence: targeting sequence/synthetic sequence
QSLKCEAAAGNPQPSYRWFK

SEQ ID NO: 10769 - protein, 20 aa, Artificial Sequence
  Description of Artificial Sequence: targeting sequence/synthetic sequence
CEAAAGNPQPSYRWFKDGKE

SEQ ID NO: 10770 - protein, 20 aa, Artificial Sequence
  Description of Artificial Sequence: targeting sequence/synthetic sequence
LGGLTMGGIAAGVGTGTTAL

SEQ ID NO: 10771 - protein, 20 aa, Artificial Sequence
  Description of Artificial Sequence: targeting sequence/synthetic sequence
ITQIQPSIQTGSEEIKSLYN

SEQ ID NO: 10772 - protein, 20 aa, Artificial Sequence
  Description of Artificial Sequence: targeting sequence/synthetic sequence
QLQPSLKTGSEELTSLYNTV

SEQ ID NO: 10773 - protein, 20 aa, Artificial Sequence
  Description of Artificial Sequence: targeting sequence/synthetic sequence
ELLNQAQEHFGKDKSKEFQL

SEQ ID NO: 10774 - protein, 20 aa, Artificial Sequence
  Description of Artificial Sequence: targeting sequence/synthetic sequence
AGSHSQAANFAAQKTHQDQY

SEQ ID NO: 10775 - protein, 20 aa, Artificial Sequence
  Description of Artificial Sequence: targeting sequence/synthetic sequence
SNVHVSVAGSHSQAANFAAQ

SEQ ID NO: 10776 - protein, 20 aa, Artificial Sequence
  Description of Artificial Sequence: targeting sequence/synthetic sequence
AAGATARATTASRLPSSAVT

SEQ ID NO: 10777 - protein, 20 aa, Artificial Sequence
  Description of Artificial Sequence: targeting sequence/synthetic sequence
NAVARVADTIGSGPSNSQAV

SEQ ID NO: 10778 - protein, 20 aa, Artificial Sequence
  Description of Artificial Sequence: targeting sequence/synthetic sequence
QLQSSLQTGSEELKSLYNTV

SEQ ID NO: 10779 - protein, 20 aa, Artificial Sequence
  Description of Artificial Sequence: targeting sequence/synthetic sequence
SGPSVLGTGTGGSGGFHLAQ

SEQ ID NO: 10780 - protein, 20 aa, Artificial Sequence
  Description of Artificial Sequence: targeting sequence/synthetic sequence
TSALAGQRQGTQAESNLSSK

SEQ ID NO: 10781 - protein, 20 aa, Artificial Sequence
  Description of Artificial Sequence: targeting sequence/synthetic sequence
VVKDSTIGGSPQPRPSVGAF

SEQ ID NO: 10782 - protein, 20 aa, Artificial Sequence
  Description of Artificial Sequence: targeting sequence/synthetic sequence
QVDINGFTTGRRGDLATIHG

SEQ ID NO: 10783 - protein, 20 aa, Artificial Sequence
  Description of Artificial Sequence: targeting sequence/synthetic sequence
SVAGSHSQAANFAAQKTHQD

SEQ ID NO: 10784 - protein, 20 aa, Artificial Sequence
  Description of Artificial Sequence: targeting sequence/synthetic sequence
SHTWSLERSESLTSDSQSGI

SEQ ID NO: 10785 - protein, 20 aa, Artificial Sequence
  Description of Artificial Sequence: targeting sequence/synthetic sequence
ATAGSAMGAASLTVSAQSRT

SEQ ID NO: 10786 - protein, 20 aa, Artificial Sequence
  Description of Artificial Sequence: targeting sequence/synthetic sequence
CFDSSVGSGSIQGATPGGRC

SEQ ID NO: 10787 - protein, 20 aa, Artificial Sequence
  Description of Artificial Sequence: targeting sequence/synthetic sequence
FTQETIDRLAGKPTHVNVSV

SEQ ID NO: 10788 - protein, 20 aa, Artificial Sequence
  Description of Artificial Sequence: targeting sequence/synthetic sequence
ELTQSQASLQSASSVGSARG

SEQ ID NO: 10789 - protein, 20 aa, Artificial Sequence
  Description of Artificial Sequence: targeting sequence/synthetic sequence
VAACVLPGAGGTCPERALER

SEQ ID NO: 10790 - protein, 20 aa, Artificial Sequence
  Description of Artificial Sequence: targeting sequence/synthetic sequence
ESKTPLTATLSKSGNTFRPE

SEQ ID NO: 10791 - protein, 20 aa, Artificial Sequence
  Description of Artificial Sequence: targeting sequence/synthetic sequence
DSPHSERYVSALTTPARLSP

SEQ ID NO: 10792 - protein, 20 aa, Artificial Sequence
  Description of Artificial Sequence: targeting sequence/synthetic sequence
GARLAEYHAKATEHLSTLSE

SEQ ID NO: 10793 - protein, 20 aa, Artificial Sequence
  Description of Artificial Sequence: targeting sequence/synthetic sequence
TAGAAMGAASLTLSAQSRTS

SEQ ID NO: 10794 - protein, 20 aa, Artificial Sequence
  Description of Artificial Sequence: targeting sequence/synthetic sequence
RTLFARAQGIEETIDTVISN

SEQ ID NO: 10795 - protein, 20 aa, Artificial Sequence
  Description of Artificial Sequence: targeting sequence/synthetic sequence
LAEDVRGNLRGNTEGLQKSL

SEQ ID NO: 10796 - protein, 20 aa, Artificial Sequence
  Description of Artificial Sequence: targeting sequence/synthetic sequence
LTAEILELAGNAARDNKKGR

SEQ ID NO: 10797 - protein, 20 aa, Artificial Sequence
  Description of Artificial Sequence: targeting sequence/synthetic sequence
PANGSLGPTLNLSSGESRLL

SEQ ID NO: 10798 - protein, 20 aa, Artificial Sequence
  Description of Artificial Sequence: targeting sequence/synthetic sequence
TAGVAMGTASLTLSAQSRTL

SEQ ID NO: 10799 - protein, 20 aa, Artificial Sequence
  Description of Artificial Sequence: targeting sequence/synthetic sequence
TNDTYMVAGTPGTYRTGTSV

SEQ ID NO: 10800 - protein, 20 aa, Artificial Sequence
  Description of Artificial Sequence: targeting sequence/synthetic sequence
LATAGSAMGAASLTLSAQSR

SEQ ID NO: 10801 - protein, 20 aa, Artificial Sequence
  Description of Artificial Sequence: targeting sequence/synthetic sequence
ARVADTIGSGPSNSQAVPAL

SEQ ID NO: 10802 - protein, 20 aa, Artificial Sequence
  Description of Artificial Sequence: targeting sequence/synthetic sequence
KSPANGSLGPTLNLSSGESR

SEQ ID NO: 10803 - protein, 20 aa, Artificial Sequence
  Description of Artificial Sequence: targeting sequence/synthetic sequence
RQLQPSLQTGTEEIKSLYNA

SEQ ID NO: 10804 - protein, 20 aa, Artificial Sequence
  Description of Artificial Sequence: targeting sequence/synthetic sequence
AEDVRGNLRGNTEGLQKSLA

SEQ ID NO: 10805 - protein, 20 aa, Artificial Sequence
  Description of Artificial Sequence: targeting sequence/synthetic sequence
GSGPSVLGTGTGGSGGFHLA

SEQ ID NO: 10806 - protein, 20 aa, Artificial Sequence
  Description of Artificial Sequence: targeting sequence/synthetic sequence
TDTTITVMLKPAQSRGAPVS

SEQ ID NO: 10807 - protein, 20 aa, Artificial Sequence
  Description of Artificial Sequence: targeting sequence/synthetic sequence
SELTQSQASLQSASSVGSAR

SEQ ID NO: 10808 - protein, 20 aa, Artificial Sequence
  Description of Artificial Sequence: targeting sequence/synthetic sequence
PKPTSNVHVSVAGSHSQAAN

SEQ ID NO: 10809 - protein, 20 aa, Artificial Sequence
  Description of Artificial Sequence: targeting sequence/synthetic sequence
ISRPAAPPEPRPQQQPQPRS

SEQ ID NO: 10810 - protein, 20 aa, Artificial Sequence
  Description of Artificial Sequence: targeting sequence/synthetic sequence
TLFARAQGIEETIDTVISNA

SEQ ID NO: 10811 - protein, 20 aa, Artificial Sequence
  Description of Artificial Sequence: targeting sequence/synthetic sequence
QSRSVPPSASHVAPTETFTY

SEQ ID NO: 10812 - protein, 20 aa, Artificial Sequence
  Description of Artificial Sequence: targeting sequence/synthetic sequence
AVRLLLPGQMGKLAESEGTK

SEQ ID NO: 10813 - protein, 20 aa, Artificial Sequence
  Description of Artificial Sequence: targeting sequence/synthetic sequence
MRQLQPSLQTGTEEIKSLYN

SEQ ID NO: 10814 - protein, 20 aa, Artificial Sequence
  Description of Artificial Sequence: targeting sequence/synthetic sequence
LNETDTTITVMLKPAQSRGA

SEQ ID NO: 10815 - protein, 20 aa, Artificial Sequence
  Description of Artificial Sequence: targeting sequence/synthetic sequence
RSIVRVADTLPSGPSNSESI

SEQ ID NO: 10816 - protein, 20 aa, Artificial Sequence
  Description of Artificial Sequence: targeting sequence/synthetic sequence
QLQPSLQTGSEELKSLYNTV

SEQ ID NO: 10817 - protein, 20 aa, Artificial Sequence
  Description of Artificial Sequence: targeting sequence/synthetic sequence
VVAACVLPGAGGTCPERALE

SEQ ID NO: 10818 - protein, 20 aa, Artificial Sequence
  Description of Artificial Sequence: targeting sequence/synthetic sequence
SSQSQGISSSSTSTMPNSSQ

SEQ ID NO: 10819 - protein, 20 aa, Artificial Sequence
  Description of Artificial Sequence: targeting sequence/synthetic sequence
MGGIAAGVGTGTTALVATKQ

SEQ ID NO: 10820 - protein, 20 aa, Artificial Sequence
  Description of Artificial Sequence: targeting sequence/synthetic sequence
QPAIQTGTEELRSLYNTVAT

SEQ ID NO: 10821 - protein, 20 aa, Artificial Sequence
  Description of Artificial Sequence: targeting sequence/synthetic sequence
RQILGQLQPSLQTGSEELRS

SEQ ID NO: 10822 - protein, 20 aa, Artificial Sequence
  Description of Artificial Sequence: targeting sequence/synthetic sequence
SIGRVADTIGSGPSNSEAIP

SEQ ID NO: 10823 - protein, 20 aa, Artificial Sequence
  Description of Artificial Sequence: targeting sequence/synthetic sequence
SGAGGAANGTGAGAVMGPNA

SEQ ID NO: 10824 - protein, 20 aa, Artificial Sequence
  Description of Artificial Sequence: targeting sequence/synthetic sequence
QREGSLQVGNEAPVTGSSPL

SEQ ID NO: 10825 - protein, 20 aa, Artificial Sequence
  Description of Artificial Sequence: targeting sequence/synthetic sequence
PSVLGTGTGGSGGFHLAQQA

SEQ ID NO: 10826 - protein, 20 aa, Artificial Sequence
  Description of Artificial Sequence: targeting sequence/synthetic sequence
AAGSTMGAASVTLTVQARQL

SEQ ID NO: 10827 - protein, 20 aa, Artificial Sequence
  Description of Artificial Sequence: targeting sequence/synthetic sequence
FDSSVGSGSIQGATPGGRCN

SEQ ID NO: 10828 - protein, 20 aa, Artificial Sequence
  Description of Artificial Sequence: targeting sequence/synthetic sequence
AGAAMGAASLTLSAQSRTSL

SEQ ID NO: 10829 - protein, 20 aa, Artificial Sequence
  Description of Artificial Sequence: targeting sequence/synthetic sequence
SALAMGAGVAGGITGSMSLA

SEQ ID NO: 10830 - protein, 20 aa, Artificial Sequence
  Description of Artificial Sequence: targeting sequence/synthetic sequence
EELNKLLGRVTIAQGGVLPN

SEQ ID NO: 10831 - protein, 20 aa, Artificial Sequence
  Description of Artificial Sequence: targeting sequence/synthetic sequence
NKLLGGVTIAQGGVLPNIQA

SEQ ID NO: 10832 - protein, 20 aa, Artificial Sequence
  Description of Artificial Sequence: targeting sequence/synthetic sequence
GAGGAANGTGAGAVMGPNAT

SEQ ID NO: 10833 - protein, 20 aa, Artificial Sequence
  Description of Artificial Sequence: targeting sequence/synthetic sequence
LVSALAIGAGVAGGITGSMS

SEQ ID NO: 10834 - protein, 20 aa, Artificial Sequence
  Description of Artificial Sequence: targeting sequence/synthetic sequence
YVDGVEVHNAKTKPREEQFN

SEQ ID NO: 10835 - protein, 20 aa, Artificial Sequence
  Description of Artificial Sequence: targeting sequence/synthetic sequence
ALAMGAGMAGGITGSMSLAS

SEQ ID NO: 10836 - protein, 20 aa, Artificial Sequence
  Description of Artificial Sequence: targeting sequence/synthetic sequence
GVEVHNAKTKPREEQYNSTY

SEQ ID NO: 10837 - protein, 20 aa, Artificial Sequence
  Description of Artificial Sequence: targeting sequence/synthetic sequence
TQSQASLQSASSVGSARGDE

SEQ ID NO: 10838 - protein, 20 aa, Artificial Sequence
  Description of Artificial Sequence: targeting sequence/synthetic sequence
RLAEYHAKATEHLSTLSEKA

SEQ ID NO: 10839 - protein, 20 aa, Artificial Sequence
  Description of Artificial Sequence: targeting sequence/synthetic sequence
TMGGIAAGVGTGTTALVATK

SEQ ID NO: 10840 - protein, 20 aa, Artificial Sequence
  Description of Artificial Sequence: targeting sequence/synthetic sequence
HREQREGSLQVGNEAPVTGS

SEQ ID NO: 10841 - protein, 20 aa, Artificial Sequence
  Description of Artificial Sequence: targeting sequence/synthetic sequence
KIISVLEPLVPTGSENLKSL

SEQ ID NO: 10842 - protein, 20 aa, Artificial Sequence
  Description of Artificial Sequence: targeting sequence/synthetic sequence
GFLGAAGSTMGAASITLTAQ

SEQ ID NO: 10843 - protein, 20 aa, Artificial Sequence
  Description of Artificial Sequence: targeting sequence/synthetic sequence
LLLPGELAKHAVSEGTKAVT

SEQ ID NO: 10844 - protein, 20 aa, Artificial Sequence
  Description of Artificial Sequence: targeting sequence/synthetic sequence
ATAGSAMGAASLTLSAHPGL

SEQ ID NO: 10845 - protein, 20 aa, Artificial Sequence
  Description of Artificial Sequence: targeting sequence/synthetic sequence
TIINPRSSLVLAATSGNSGT

SEQ ID NO: 10846 - protein, 20 aa, Artificial Sequence
  Description of Artificial Sequence: targeting sequence/synthetic sequence
QQSYLDSGIHSGATTTAPSL

SEQ ID NO: 10847 - protein, 20 aa, Artificial Sequence
  Description of Artificial Sequence: targeting sequence/synthetic sequence
INPKSALVLSAESSSMGGTL

SEQ ID NO: 10848 - protein, 20 aa, Artificial Sequence
  Description of Artificial Sequence: targeting sequence/synthetic sequence
SQGISSSSTSTMPNSSQSSH

SEQ ID NO: 10849 - protein, 20 aa, Artificial Sequence
  Description of Artificial Sequence: targeting sequence/synthetic sequence
FLGAAGSTMGAASVTLTVQA

SEQ ID NO: 10850 - protein, 20 aa, Artificial Sequence
  Description of Artificial Sequence: targeting sequence/synthetic sequence
IITQIQPSIQTGSEEIKSLY

SEQ ID NO: 10851 - protein, 20 aa, Artificial Sequence
  Description of Artificial Sequence: targeting sequence/synthetic sequence
AGVAMGTASLTLSAQSRTLL

SEQ ID NO: 10852 - protein, 20 aa, Artificial Sequence
  Description of Artificial Sequence: targeting sequence/synthetic sequence
IIGQLQPSIQTGSEEIRSLY

SEQ ID NO: 10853 - protein, 20 aa, Artificial Sequence
  Description of Artificial Sequence: targeting sequence/synthetic sequence
HWQQQSYLDSGIHSGATTTA

SEQ ID NO: 10854 - protein, 20 aa, Artificial Sequence
  Description of Artificial Sequence: targeting sequence/synthetic sequence
GQLQSSLQTGSEELKSLYNA

SEQ ID NO: 10855 - protein, 20 aa, Artificial Sequence
  Description of Artificial Sequence: targeting sequence/synthetic sequence
GTQGRLCNKTSEGMDGCELM

SEQ ID NO: 10856 - protein, 20 aa, Artificial Sequence
  Description of Artificial Sequence: targeting sequence/synthetic sequence
NYNPQSRSVPPSASHVAPTE

SEQ ID NO: 10857 - protein, 20 aa, Artificial Sequence
  Description of Artificial Sequence: targeting sequence/synthetic sequence
VSRVADTIMSGPSNSQQVPA

SEQ ID NO: 10858 - protein, 20 aa, Artificial Sequence
  Description of Artificial Sequence: targeting sequence/synthetic sequence
PQSRSVPPSASHVAPTETFT

SEQ ID NO: 10859 - protein, 20 aa, Artificial Sequence
  Description of Artificial Sequence: targeting sequence/synthetic sequence
VDINGFTTGRRGDLATIHGM

SEQ ID NO: 10860 - protein, 20 aa, Artificial Sequence
  Description of Artificial Sequence: targeting sequence/synthetic sequence
PETPVVKDSTIGGSPQPRPS

SEQ ID NO: 10861 - protein, 20 aa, Artificial Sequence
  Description of Artificial Sequence: targeting sequence/synthetic sequence
LATAGSAMGAASLTVSAQSR

SEQ ID NO: 10862 - protein, 20 aa, Artificial Sequence
  Description of Artificial Sequence: targeting sequence/synthetic sequence
LPNRTSGLLETNFTASARTT

SEQ ID NO: 10863 - protein, 20 aa, Artificial Sequence
  Description of Artificial Sequence: targeting sequence/synthetic sequence
EATLVEEQDTNFVCRRTFVD

SEQ ID NO: 10864 - protein, 20 aa, Artificial Sequence
  Description of Artificial Sequence: targeting sequence/synthetic sequence
GSVGTQGRLCNRTSPGADGC

SEQ ID NO: 10865 - protein, 20 aa, Artificial Sequence
  Description of Artificial Sequence: targeting sequence/synthetic sequence
TLVEEQDTNFVCRRTFVDRG

SEQ ID NO: 10866 - protein, 20 aa, Artificial Sequence
  Description of Artificial Sequence: targeting sequence/synthetic sequence
EIQTAVRLLLPGELAKHAVS

SEQ ID NO: 10867 - protein, 20 aa, Artificial Sequence
  Description of Artificial Sequence: targeting sequence/synthetic sequence
GAAGSTMGAVSLTLTVQARQ

SEQ ID NO: 10868 - protein, 20 aa, Artificial Sequence
  Description of Artificial Sequence: targeting sequence/synthetic sequence
LQVDINGFTTGRRGDLATIH

SEQ ID NO: 10869 - protein, 20 aa, Artificial Sequence
  Description of Artificial Sequence: targeting sequence/synthetic sequence
KAWHTTNDTYMVAGTPGTYR

SEQ ID NO: 10870 - protein, 20 aa, Artificial Sequence
  Description of Artificial Sequence: targeting sequence/synthetic sequence
STMGATSMALTVQARQLLSG

SEQ ID NO: 10871 - protein, 20 aa, Artificial Sequence
  Description of Artificial Sequence: targeting sequence/synthetic sequence
KAGRGASQPPTPTPASDAFQ

SEQ ID NO: 10872 - protein, 20 aa, Artificial Sequence
  Description of Artificial Sequence: targeting sequence/synthetic sequence
TIINPKSALVLSAESSSMGG

SEQ ID NO: 10873 - protein, 20 aa, Artificial Sequence
  Description of Artificial Sequence: targeting sequence/synthetic sequence
LGAAGSTMGAVSLTLTVQAR

SEQ ID NO: 10874 - protein, 20 aa, Artificial Sequence
  Description of Artificial Sequence: targeting sequence/synthetic sequence
GFLAMAGSAMGATSLTLSAQ

SEQ ID NO: 10875 - protein, 20 aa, Artificial Sequence
  Description of Artificial Sequence: targeting sequence/synthetic sequence
AEPTKAGRGASQPPTPTPAS

SEQ ID NO: 10876 - protein, 20 aa, Artificial Sequence
  Description of Artificial Sequence: targeting sequence/synthetic sequence
TPLTANITKSGNTFRPEVHL

SEQ ID NO: 10877 - protein, 20 aa, Artificial Sequence
  Description of Artificial Sequence: targeting sequence/synthetic sequence
HVQLQNYSKVERHPVTALEK

SEQ ID NO: 10878 - protein, 20 aa, Artificial Sequence
  Description of Artificial Sequence: targeting sequence/synthetic sequence
VNKEIQNAVNGVKQIKTLIE

SEQ ID NO: 10879 - protein, 20 aa, Artificial Sequence
  Description of Artificial Sequence: targeting sequence/synthetic sequence
SSTQNKRANRTEENVSDGSP

SEQ ID NO: 10880 - protein, 20 aa, Artificial Sequence
  Description of Artificial Sequence: targeting sequence/synthetic sequence
EVTWLVRHTENVTKTKTPED

SEQ ID NO: 10881 - protein, 20 aa, Artificial Sequence
  Description of Artificial Sequence: targeting sequence/synthetic sequence
SRPAAPPEPRPQQQPQPRSP

SEQ ID NO: 10882 - protein, 20 aa, Artificial Sequence
  Description of Artificial Sequence: targeting sequence/synthetic sequence
TMWVDDQEVINKASNSNKIR

SEQ ID NO: 10883 - protein, 20 aa, Artificial Sequence
  Description of Artificial Sequence: targeting sequence/synthetic sequence
DNVERTNKIKDGYWDPGPRA

SEQ ID NO: 10884 - protein, 20 aa, Artificial Sequence
  Description of Artificial Sequence: targeting sequence/synthetic sequence
QLITQEPKEANSTTSQKQSK

SEQ ID NO: 10885 - protein, 20 aa, Artificial Sequence
  Description of Artificial Sequence: targeting sequence/synthetic sequence
NSQTIPQISNRTLNTLVQDN

SEQ ID NO: 10886 - protein, 20 aa, Artificial Sequence
  Description of Artificial Sequence: targeting sequence/synthetic sequence
RPAAPPEPRPQQQPQPRSPA

SEQ ID NO: 10887 - protein, 20 aa, Artificial Sequence
  Description of Artificial Sequence: targeting sequence/synthetic sequence
VEKTNKIKDRYWDSGPRADP

SEQ ID NO: 10888 - protein, 20 aa, Artificial Sequence
  Description of Artificial Sequence: targeting sequence/synthetic sequence
EAVLALYNSTRDRVAGESAE

SEQ ID NO: 10889 - protein, 20 aa, Artificial Sequence
  Description of Artificial Sequence: targeting sequence/synthetic sequence
AEILELAGNASRDNKKTRII

SEQ ID NO: 10890 - protein, 20 aa, Artificial Sequence
  Description of Artificial Sequence: targeting sequence/synthetic sequence
LISNLSNTIEKINTLGLDSK

SEQ ID NO: 10891 - protein, 20 aa, Artificial Sequence
  Description of Artificial Sequence: targeting sequence/synthetic sequence
KVQGLVPAGGSSSNSTREPP

SEQ ID NO: 10892 - protein, 20 aa, Artificial Sequence
  Description of Artificial Sequence: targeting sequence/synthetic sequence
AVLALYNSTRDRVAGESAEP

SEQ ID NO: 10893 - protein, 20 aa, Artificial Sequence
  Description of Artificial Sequence: targeting sequence/synthetic sequence
FETNSSNISLRNNYMPSNHG

SEQ ID NO: 10894 - protein, 20 aa, Artificial Sequence
  Description of Artificial Sequence: targeting sequence/synthetic sequence
VDDQEVINKASNSNKIRLEK

SEQ ID NO: 10895 - protein, 20 aa, Artificial Sequence
  Description of Artificial Sequence: targeting sequence/synthetic sequence
DMIQTLTNKSKIQNVGGTYE

SEQ ID NO: 10896 - protein, 20 aa, Artificial Sequence
  Description of Artificial Sequence: targeting sequence/synthetic sequence
VLANASRIHYDGGAGTNTVS

SEQ ID NO: 10897 - protein, 20 aa, Artificial Sequence
  Description of Artificial Sequence: targeting sequence/synthetic sequence
RHTENVTKTKTPEDYADSSI

SEQ ID NO: 10898 - protein, 20 aa, Artificial Sequence
  Description of Artificial Sequence: targeting sequence/synthetic sequence
GTAGRVCNLTSRGMDSCEVM

SEQ ID NO: 10899 - protein, 20 aa, Artificial Sequence
  Description of Artificial Sequence: targeting sequence/synthetic sequence
PTTNSTTNSATKITANTTDE

SEQ ID NO: 10900 - protein, 20 aa, Artificial Sequence
  Description of Artificial Sequence: targeting sequence/synthetic sequence
KIKEKYIDQEELNKTKPIWT

SEQ ID NO: 10901 - protein, 20 aa, Artificial Sequence
  Description of Artificial Sequence: targeting sequence/synthetic sequence
DQEVINKASNSNKIRLEKGR

SEQ ID NO: 10902 - protein, 20 aa, Artificial Sequence
  Description of Artificial Sequence: targeting sequence/synthetic sequence
SLPATLPQCQAANKTCPTNY

SEQ ID NO: 10903 - protein, 20 aa, Artificial Sequence
  Description of Artificial Sequence: targeting sequence/synthetic sequence
RPASRANTVRSFHHEEHLEN

SEQ ID NO: 10904 - protein, 20 aa, Artificial Sequence
  Description of Artificial Sequence: targeting sequence/synthetic sequence
FNDMANAAKGLEWVSNKISK

SEQ ID NO: 10905 - protein, 20 aa, Artificial Sequence
  Description of Artificial Sequence: targeting sequence/synthetic sequence
TSGLLETNFTASARTTGSGL

SEQ ID NO: 10906 - protein, 20 aa, Artificial Sequence
  Description of Artificial Sequence: targeting sequence/synthetic sequence
DVVEKTNKIKDRYWDSGPRA

SEQ ID NO: 10907 - protein, 20 aa, Artificial Sequence
  Description of Artificial Sequence: targeting sequence/synthetic sequence
TITTNEIRNKLSYSFDGAGG

SEQ ID NO: 10908 - protein, 20 aa, Artificial Sequence
  Description of Artificial Sequence: targeting sequence/synthetic sequence
NLSLPNSTAQALLAARVDPP

SEQ ID NO: 10909 - protein, 20 aa, Artificial Sequence
  Description of Artificial Sequence: targeting sequence/synthetic sequence
GSLGTQGRLCNKTSEGMDGC

SEQ ID NO: 10910 - protein, 20 aa, Artificial Sequence
  Description of Artificial Sequence: targeting sequence/synthetic sequence
ITTNEIRNKLSYSFDGAGGT

SEQ ID NO: 10911 - protein, 20 aa, Artificial Sequence
  Description of Artificial Sequence: targeting sequence/synthetic sequence
AAGYDVEKNNSRIKLGLKSL

SEQ ID NO: 10912 - protein, 20 aa, Artificial Sequence
  Description of Artificial Sequence: targeting sequence/synthetic sequence
AAAGYDVEKNNSRIKLGLKS

SEQ ID NO: 10913 - protein, 20 aa, Artificial Sequence
  Description of Artificial Sequence: targeting sequence/synthetic sequence
TIPQISNRTLNTLVQDNSYV

SEQ ID NO: 10914 - protein, 20 aa, Artificial Sequence
  Description of Artificial Sequence: targeting sequence/synthetic sequence
NRQSSTSVIETNKTSVELSL

SEQ ID NO: 10915 - protein, 20 aa, Artificial Sequence
  Description of Artificial Sequence: targeting sequence/synthetic sequence
TQNLSLPNSTAQALLAARVD

SEQ ID NO: 10916 - protein, 20 aa, Artificial Sequence
  Description of Artificial Sequence: targeting sequence/synthetic sequence
LEYPERPASRANTVRSFHHE

SEQ ID NO: 10917 - protein, 20 aa, Artificial Sequence
  Description of Artificial Sequence: targeting sequence/synthetic sequence
GYLDRNLEKNSTKQEILAAL

SEQ ID NO: 10918 - protein, 20 aa, Artificial Sequence
  Description of Artificial Sequence: targeting sequence/synthetic sequence
PGDPTSNATSRGAEGPLPPP

SEQ ID NO: 10919 - protein, 20 aa, Artificial Sequence
  Description of Artificial Sequence: targeting sequence/synthetic sequence
GSHGTQDRQCNKTSNGSDSC

SEQ ID NO: 10920 - protein, 20 aa, Artificial Sequence
  Description of Artificial Sequence: targeting sequence/synthetic sequence
TRDNANRIIKTTLQQEKPDF

SEQ ID NO: 10921 - protein, 20 aa, Artificial Sequence
  Description of Artificial Sequence: targeting sequence/synthetic sequence
DDQEVINKASNSNKIRLEKG

SEQ ID NO: 10922 - protein, 20 aa, Artificial Sequence
  Description of Artificial Sequence: targeting sequence/synthetic sequence
SLGTAGRVCNLTSRGMDSCE

SEQ ID NO: 10923 - protein, 20 aa, Artificial Sequence
  Description of Artificial Sequence: targeting sequence/synthetic sequence
DEVTWLVRHTENVTKTKTPE

SEQ ID NO: 10924 - protein, 20 aa, Artificial Sequence
  Description of Artificial Sequence: targeting sequence/synthetic sequence
LGTAGRVCNLTSRGMDSCEV

SEQ ID NO: 10925 - protein, 20 aa, Artificial Sequence
  Description of Artificial Sequence: targeting sequence/synthetic sequence
KSHVQLQNYSKVERHPVTAL

SEQ ID NO: 10926 - protein, 20 aa, Artificial Sequence
  Description of Artificial Sequence: targeting sequence/synthetic sequence
HGTQDRQCNKTSNGSDSCDL

SEQ ID NO: 10927 - protein, 20 aa, Artificial Sequence
  Description of Artificial Sequence: targeting sequence/synthetic sequence
TGGGRARALNESKRVNNGNT

SEQ ID NO: 10928 - protein, 20 aa, Artificial Sequence
  Description of Artificial Sequence: targeting sequence/synthetic sequence
ENVDFRIHVENQTRARDDVS

SEQ ID NO: 10929 - protein, 20 aa, Artificial Sequence
  Description of Artificial Sequence: targeting sequence/synthetic sequence
NDMANAAKGLEWVSNKISKF

SEQ ID NO: 10930 - protein, 20 aa, Artificial Sequence
  Description of Artificial Sequence: targeting sequence/synthetic sequence
ASRANTVRSFHHEEHLENIP

SEQ ID NO: 10931 - protein, 20 aa, Artificial Sequence
  Description of Artificial Sequence: targeting sequence/synthetic sequence
RVTNNVKDVTKLVANLPKDY

SEQ ID NO: 10932 - protein, 20 aa, Artificial Sequence
  Description of Artificial Sequence: targeting sequence/synthetic sequence
KSENLVKSHVQLQNYSKVER

SEQ ID NO: 10933 - protein, 20 aa, Artificial Sequence
  Description of Artificial Sequence: targeting sequence/synthetic sequence
PERPASRANTVRSFHHEEHL

SEQ ID NO: 10934 - protein, 20 aa, Artificial Sequence
  Description of Artificial Sequence: targeting sequence/synthetic sequence
LANASRIHYDGGAGTNTVSY

SEQ ID NO: 10935 - protein, 20 aa, Artificial Sequence
  Description of Artificial Sequence: targeting sequence/synthetic sequence
GSFGTRDRTCNVTSHGIDGC

SEQ ID NO: 10936 - protein, 20 aa, Artificial Sequence
  Description of Artificial Sequence: targeting sequence/synthetic sequence
CTAAHPELKTPLTANITKSG

SEQ ID NO: 10937 - protein, 20 aa, Artificial Sequence
  Description of Artificial Sequence: targeting sequence/synthetic sequence
YIDQEELNKTKPIWTRNPDD

SEQ ID NO: 10938 - protein, 20 aa, Artificial Sequence
  Description of Artificial Sequence: targeting sequence/synthetic sequence
NLPGDPTSNATSRGAEGPLP

SEQ ID NO: 10939 - protein, 20 aa, Artificial Sequence
  Description of Artificial Sequence: targeting sequence/synthetic sequence
HSDAVFTDNYTALRKQMAVK

SEQ ID NO: 10940 - protein, 20 aa, Artificial Sequence
  Description of Artificial Sequence: targeting sequence/synthetic sequence
DAVLGNSTAVNRGDSSIDLT

SEQ ID NO: 10941 - protein, 20 aa, Artificial Sequence
  Description of Artificial Sequence: targeting sequence/synthetic sequence
KKLVGYLDRNLEKNSTKQEI

SEQ ID NO: 10942 - protein, 20 aa, Artificial Sequence
  Description of Artificial Sequence: targeting sequence/synthetic sequence
TKLMQNSTKAPLKRSNVEKV

SEQ ID NO: 10943 - protein, 20 aa, Artificial Sequence
  Description of Artificial Sequence: targeting sequence/synthetic sequence
VKSHVQLQNYSKVERHPVTA

SEQ ID NO: 10944 - protein, 20 aa, Artificial Sequence
  Description of Artificial Sequence: targeting sequence/synthetic sequence
AVLGNSTAVNRGDSSIDLTV

SEQ ID NO: 10945 - protein, 20 aa, Artificial Sequence
  Description of Artificial Sequence: targeting sequence/synthetic sequence
GKSIDDNSTKSEKQTPREHS

SEQ ID NO: 10946 - protein, 20 aa, Artificial Sequence
  Description of Artificial Sequence: targeting sequence/synthetic sequence
LPGDPTSNATSRGAEGPLPP

SEQ ID NO: 10947 - protein, 20 aa, Artificial Sequence
  Description of Artificial Sequence: targeting sequence/synthetic sequence
VLALYNSTRDRVAGESAEPE

SEQ ID NO: 10948 - protein, 20 aa, Artificial Sequence
  Description of Artificial Sequence: targeting sequence/synthetic sequence
ISNRVRVSIQTGTAFQPDAA

SEQ ID NO: 10949 - protein, 20 aa, Artificial Sequence
  Description of Artificial Sequence: targeting sequence/synthetic sequence
NRTSGLLETNFTASARTTGS

SEQ ID NO: 10950 - protein, 20 aa, Artificial Sequence
  Description of Artificial Sequence: targeting sequence/synthetic sequence
QEELNKTKPIWTRNPDDITQ

SEQ ID NO: 10951 - protein, 20 aa, Artificial Sequence
  Description of Artificial Sequence: targeting sequence/synthetic sequence
SFGTRDRTCNVTSHGIDGCD

SEQ ID NO: 10952 - protein, 20 aa, Artificial Sequence
  Description of Artificial Sequence: targeting sequence/synthetic sequence
STSVIETNKTSVELSLPFDE

SEQ ID NO: 10953 - protein, 20 aa, Artificial Sequence
  Description of Artificial Sequence: targeting sequence/synthetic sequence
PSTDAVLGNSTAVNRGDSSI

SEQ ID NO: 10954 - protein, 20 aa, Artificial Sequence
  Description of Artificial Sequence: targeting sequence/synthetic sequence
ATLNSVLNSNAIKNLPPPLG

SEQ ID NO: 10955 - protein, 20 aa, Artificial Sequence
  Description of Artificial Sequence: targeting sequence/synthetic sequence
PMLTCPEANATKVCGSDGVT

SEQ ID NO: 10956 - protein, 20 aa, Artificial Sequence
  Description of Artificial Sequence: targeting sequence/synthetic sequence
DAVFTDNYTALRKQMAVKKY

SEQ ID NO: 10957 - protein, 20 aa, Artificial Sequence
  Description of Artificial Sequence: targeting sequence/synthetic sequence
KRRNGPEFSNDIKKRKVDDK

SEQ ID NO: 10958 - protein, 20 aa, Artificial Sequence
  Description of Artificial Sequence: targeting sequence/synthetic sequence
SGLLETNFTASARTTGSGLL

SEQ ID NO: 10959 - protein, 20 aa, Artificial Sequence
  Description of Artificial Sequence: targeting sequence/synthetic sequence
AAGYDVEKNNSRIKLGIKSL

SEQ ID NO: 10960 - protein, 20 aa, Artificial Sequence
  Description of Artificial Sequence: targeting sequence/synthetic sequence
GDPTSNATSRGAEGPLPPPS

SEQ ID NO: 10961 - protein, 20 aa, Artificial Sequence
  Description of Artificial Sequence: targeting sequence/synthetic sequence
PEAVLALYNSTRDRVAGESA

SEQ ID NO: 10962 - protein, 20 aa, Artificial Sequence
  Description of Artificial Sequence: targeting sequence/synthetic sequence
DRLLSTLFNTTTISKVAPGE

SEQ ID NO: 10963 - protein, 20 aa, Artificial Sequence
  Description of Artificial Sequence: targeting sequence/synthetic sequence
SGKSIDDNSTKSEKQTPREH

SEQ ID NO: 10964 - protein, 20 aa, Artificial Sequence
  Description of Artificial Sequence: targeting sequence/synthetic sequence
KIVVKNATKSNVNNAVNTLV

SEQ ID NO: 10965 - protein, 20 aa, Artificial Sequence
  Description of Artificial Sequence: targeting sequence/synthetic sequence
GPLPEAVLALYNSTRDRVAG

SEQ ID NO: 10966 - protein, 20 aa, Artificial Sequence
  Description of Artificial Sequence: targeting sequence/synthetic sequence
SRANTVRSFHHEEHLENIPG

SEQ ID NO: 10967 - protein, 20 aa, Artificial Sequence
  Description of Artificial Sequence: targeting sequence/synthetic sequence
RLLSTLFNTTTISKVAPGED

SEQ ID NO: 10968 - protein, 20 aa, Artificial Sequence
  Description of Artificial Sequence: targeting sequence/synthetic sequence
STGGGRARALNESKRVNNGN

SEQ ID NO: 10969 - protein, 20 aa, Artificial Sequence
  Description of Artificial Sequence: targeting sequence/synthetic sequence
YKIRMDIDVVEKTNKIKDRY

SEQ ID NO: 10970 - protein, 20 aa, Artificial Sequence
  Description of Artificial Sequence: targeting sequence/synthetic sequence
NMTKATVNYRQEKTHMMSAV

SEQ ID NO: 10971 - protein, 20 aa, Artificial Sequence
  Description of Artificial Sequence: targeting sequence/synthetic sequence
GGRARALNESKRVNNGNTAP

SEQ ID NO: 10972 - protein, 20 aa, Artificial Sequence
  Description of Artificial Sequence: targeting sequence/synthetic sequence
FETNSSNISLRNNYMPSNHR

SEQ ID NO: 10973 - protein, 20 aa, Artificial Sequence
  Description of Artificial Sequence: targeting sequence/synthetic sequence
IRDEVTWLVRHTENVTKTKT

SEQ ID NO: 10974 - protein, 20 aa, Artificial Sequence
  Description of Artificial Sequence: targeting sequence/synthetic sequence
SVGTQGRLCNRTSPGADGCD

SEQ ID NO: 10975 - protein, 20 aa, Artificial Sequence
  Description of Artificial Sequence: targeting sequence/synthetic sequence
RSGASASGVYTIQVSNATKP

SEQ ID NO: 10976 - protein, 20 aa, Artificial Sequence
  Description of Artificial Sequence: targeting sequence/synthetic sequence
LFETNSSNISLRNNYMPSNH

SEQ ID NO: 10977 - protein, 20 aa, Artificial Sequence
  Description of Artificial Sequence: targeting sequence/synthetic sequence
AAIPSALDTNSSKSTSSFPC

SEQ ID NO: 10978 - protein, 20 aa, Artificial Sequence
  Description of Artificial Sequence: targeting sequence/synthetic sequence
PVNMTKATVNYRQEKTHMMS

SEQ ID NO: 10979 - protein, 20 aa, Artificial Sequence
  Description of Artificial Sequence: targeting sequence/synthetic sequence
FRIHVENQTRARDDVSRKQL

SEQ ID NO: 10980 - protein, 20 aa, Artificial Sequence
  Description of Artificial Sequence: targeting sequence/synthetic sequence
ATLPQCQAANKTCPTNYMWN

SEQ ID NO: 10981 - protein, 20 aa, Artificial Sequence
  Description of Artificial Sequence: targeting sequence/synthetic sequence
YISNRVRVSIQTGTAFQPDA

SEQ ID NO: 10982 - protein, 20 aa, Artificial Sequence
  Description of Artificial Sequence: targeting sequence/synthetic sequence
AQIRKLTDMEAQLLNQTSRM

SEQ ID NO: 10983 - protein, 20 aa, Artificial Sequence
  Description of Artificial Sequence: targeting sequence/synthetic sequence
RDNANRIIKTTLQQEKPDFC

SEQ ID NO: 10984 - protein, 20 aa, Artificial Sequence
  Description of Artificial Sequence: targeting sequence/synthetic sequence
ELENNKTMNRAENGGRPPHH

SEQ ID NO: 10985 - protein, 20 aa, Artificial Sequence
  Description of Artificial Sequence: targeting sequence/synthetic sequence
SGASASGVYTIQVSNATKPR

SEQ ID NO: 10986 - protein, 20 aa, Artificial Sequence
  Description of Artificial Sequence: targeting sequence/synthetic sequence
SPNYNPQSRSVPPSASHVAP

SEQ ID NO: 10987 - protein, 20 aa, Artificial Sequence
  Description of Artificial Sequence: targeting sequence/synthetic sequence
FNWYVDGVEVHNAKTKPREE

SEQ ID NO: 10988 - protein, 20 aa, Artificial Sequence
  Description of Artificial Sequence: targeting sequence/synthetic sequence
NWYVDGVEVHNAKTKPREEQ

SEQ ID NO: 10989 - protein, 20 aa, Artificial Sequence
  Description of Artificial Sequence: targeting sequence/synthetic sequence
YADSFVIRGDEVRQIAPGQT

SEQ ID NO: 10990 - protein, 20 aa, Artificial Sequence
  Description of Artificial Sequence: targeting sequence/synthetic sequence
SSDSIGVLGYQKTVDHTKVN

SEQ ID NO: 10991 - protein, 20 aa, Artificial Sequence
  Description of Artificial Sequence: targeting sequence/synthetic sequence
EISSDSIGVLGYQKTVDHTK

SEQ ID NO: 10992 - protein, 20 aa, Artificial Sequence
  Description of Artificial Sequence: targeting sequence/synthetic sequence
NGDRIDSLLENDRQQTHMLD

SEQ ID NO: 10993 - protein, 20 aa, Artificial Sequence
  Description of Artificial Sequence: targeting sequence/synthetic sequence
ARDTNLHTQEGVLTQNPVEN

SEQ ID NO: 10994 - protein, 20 aa, Artificial Sequence
  Description of Artificial Sequence: targeting sequence/synthetic sequence
AQLKHHSENKGLDKVMETQA

SEQ ID NO: 10995 - protein, 20 aa, Artificial Sequence
  Description of Artificial Sequence: targeting sequence/synthetic sequence
ANLPVTQPFTVGDNKTYNGY

SEQ ID NO: 10996 - protein, 20 aa, Artificial Sequence
  Description of Artificial Sequence: targeting sequence/synthetic sequence
LAAQLKHHSENKGLDKVMET

SEQ ID NO: 10997 - protein, 20 aa, Artificial Sequence
  Description of Artificial Sequence: targeting sequence/synthetic sequence
PPVSELITKAVAASKERSGV

SEQ ID NO: 10998 - protein, 20 aa, Artificial Sequence
  Description of Artificial Sequence: targeting sequence/synthetic sequence
PSVSELIVQAASSSKERGGV

SEQ ID NO: 10999 - protein, 20 aa, Artificial Sequence
  Description of Artificial Sequence: targeting sequence/synthetic sequence
VEEGLLERHSNGSQSQHSRL

SEQ ID NO: 11000 - protein, 20 aa, Artificial Sequence
  Description of Artificial Sequence: targeting sequence/synthetic sequence
RMARDTNLHLQSGAIAQNPV

SEQ ID NO: 11001 - protein, 20 aa, Artificial Sequence
  Description of Artificial Sequence: targeting sequence/synthetic sequence
IRDYPKCKTVHHIQGQNPHA

SEQ ID NO: 11002 - protein, 20 aa, Artificial Sequence
  Description of Artificial Sequence: targeting sequence/synthetic sequence
LLPGKTGKKGHASDLTSPDK

SEQ ID NO: 11003 - protein, 20 aa, Artificial Sequence
  Description of Artificial Sequence: targeting sequence/synthetic sequence
SSTSTMPNSSQSSHSSSGTL

SEQ ID NO: 11004 - protein, 20 aa, Artificial Sequence
  Description of Artificial Sequence: targeting sequence/synthetic sequence
SMVYSKSQIEAALNVNSKIL

SEQ ID NO: 11005 - protein, 20 aa, Artificial Sequence
  Description of Artificial Sequence: targeting sequence/synthetic sequence
VYSKSQISSALNVNAKVLEN

SEQ ID NO: 11006 - protein, 20 aa, Artificial Sequence
  Description of Artificial Sequence: targeting sequence/synthetic sequence
KTGKKGHASDLTSPDKIQTI

SEQ ID NO: 11007 - protein, 20 aa, Artificial Sequence
  Description of Artificial Sequence: targeting sequence/synthetic sequence
MNGDRIDSLLENDRQQTHML

SEQ ID NO: 11008 - protein, 20 aa, Artificial Sequence
  Description of Artificial Sequence: targeting sequence/synthetic sequence
GVEEGLLERHSNGSQSQHSR

SEQ ID NO: 11009 - protein, 20 aa, Artificial Sequence
  Description of Artificial Sequence: targeting sequence/synthetic sequence
MSCLRDAEPPSPTPAGPPRC

SEQ ID NO: 11010 - protein, 20 aa, Artificial Sequence
  Description of Artificial Sequence: targeting sequence/synthetic sequence
NAHSAPSLGMVSNGSTLLNH

SEQ ID NO: 11011 - protein, 20 aa, Artificial Sequence
  Description of Artificial Sequence: targeting sequence/synthetic sequence
TGASGSFKLNKKASSVETKP

SEQ ID NO: 11012 - protein, 20 aa, Artificial Sequence
  Description of Artificial Sequence: targeting sequence/synthetic sequence
LLPGKTGKKGHVSDLTAPDK

SEQ ID NO: 11013 - protein, 20 aa, Artificial Sequence
  Description of Artificial Sequence: targeting sequence/synthetic sequence
AAELKPANLPVTQPFTVGDN

SEQ ID NO: 11014 - protein, 20 aa, Artificial Sequence
  Description of Artificial Sequence: targeting sequence/synthetic sequence
VVKEAHREVINSSTEGLLLN

SEQ ID NO: 11015 - protein, 20 aa, Artificial Sequence
  Description of Artificial Sequence: targeting sequence/synthetic sequence
ELQVISLESGDASIHDTVEN

SEQ ID NO: 11016 - protein, 20 aa, Artificial Sequence
  Description of Artificial Sequence: targeting sequence/synthetic sequence
EIRRYQKSTELLIRKLPFQR

SEQ ID NO: 11017 - protein, 20 aa, Artificial Sequence
  Description of Artificial Sequence: targeting sequence/synthetic sequence
SAPSLGMVSNGSTLLNHTSD

SEQ ID NO: 11018 - protein, 20 aa, Artificial Sequence
  Description of Artificial Sequence: targeting sequence/synthetic sequence
FLTTAGAAMGAASLTLSAQS

SEQ ID NO: 11019 - protein, 20 aa, Artificial Sequence
  Description of Artificial Sequence: targeting sequence/synthetic sequence
SSPAASLGSQGSGLEQSSFQ

SEQ ID NO: 11020 - protein, 20 aa, Artificial Sequence
  Description of Artificial Sequence: targeting sequence/synthetic sequence
VYSKSQIEAALNVNSKILDG

SEQ ID NO: 11021 - protein, 20 aa, Artificial Sequence
  Description of Artificial Sequence: targeting sequence/synthetic sequence
PVEESVERAMVRVADTVSSK

SEQ ID NO: 11022 - protein, 20 aa, Artificial Sequence
  Description of Artificial Sequence: targeting sequence/synthetic sequence
PANLPVTQPFTVGDNKTYNG

SEQ ID NO: 11023 - protein, 20 aa, Artificial Sequence
  Description of Artificial Sequence: targeting sequence/synthetic sequence
IAHGYVEHSVRYQCKNYYKL

SEQ ID NO: 11024 - protein, 20 aa, Artificial Sequence
  Description of Artificial Sequence: targeting sequence/synthetic sequence
VQEKPFTVEISPGPRIAAQI

SEQ ID NO: 11025 - protein, 20 aa, Artificial Sequence
  Description of Artificial Sequence: targeting sequence/synthetic sequence
EYACKRLYSDRGWGNGCGLF

SEQ ID NO: 11026 - protein, 20 aa, Artificial Sequence
  Description of Artificial Sequence: targeting sequence/synthetic sequence
RAVGMGASFLGFLGAAGSTM

SEQ ID NO: 11027 - protein, 20 aa, Artificial Sequence
  Description of Artificial Sequence: targeting sequence/synthetic sequence
DGTSTLRENSKPEESHLLAK

SEQ ID NO: 11028 - protein, 20 aa, Artificial Sequence
  Description of Artificial Sequence: targeting sequence/synthetic sequence
QGPVEESVERAMVRVADTVS

SEQ ID NO: 11029 - protein, 20 aa, Artificial Sequence
  Description of Artificial Sequence: targeting sequence/synthetic sequence
LQVISLESGDASIHDTVENL

SEQ ID NO: 11030 - protein, 20 aa, Artificial Sequence
  Description of Artificial Sequence: targeting sequence/synthetic sequence
DYPKCKTIHHIQGQNPHAQG

SEQ ID NO: 11031 - protein, 20 aa, Artificial Sequence
  Description of Artificial Sequence: targeting sequence/synthetic sequence
SEPAKEPAKKSRKHAASDVD

SEQ ID NO: 11032 - protein, 20 aa, Artificial Sequence
  Description of Artificial Sequence: targeting sequence/synthetic sequence
LLAMAGSAMGATSLTLSAQS

SEQ ID NO: 11033 - protein, 20 aa, Artificial Sequence
  Description of Artificial Sequence: targeting sequence/synthetic sequence
FYARVCRSGSGLVGRQLEEF

SEQ ID NO: 11034 - protein, 20 aa, Artificial Sequence
  Description of Artificial Sequence: targeting sequence/synthetic sequence
REIQTAVRLLLPGELAKHAV

SEQ ID NO: 11035 - protein, 20 aa, Artificial Sequence
  Description of Artificial Sequence: targeting sequence/synthetic sequence
HEEELVARRKLPTALDGFSL

SEQ ID NO: 11036 - protein, 20 aa, Artificial Sequence
  Description of Artificial Sequence: targeting sequence/synthetic sequence
YVDPSPDYCLRNESTGSLGT

SEQ ID NO: 11037 - protein, 20 aa, Artificial Sequence
  Description of Artificial Sequence: targeting sequence/synthetic sequence
KFPSVYAWERKKISNCVADY

SEQ ID NO: 11038 - protein, 20 aa, Artificial Sequence
  Description of Artificial Sequence: targeting sequence/synthetic sequence
KTVTAMDVVYALKRQGRTLY

SEQ ID NO: 11039 - protein, 20 aa, Artificial Sequence
  Description of Artificial Sequence: targeting sequence/synthetic sequence
LCKDASDILQTGTIQGDRVA

SEQ ID NO: 11040 - protein, 20 aa, Artificial Sequence
  Description of Artificial Sequence: targeting sequence/synthetic sequence
ASKERSGVSLAALKKALAAA

SEQ ID NO: 11041 - protein, 20 aa, Artificial Sequence
  Description of Artificial Sequence: targeting sequence/synthetic sequence
ESSQKTTIDKISDVSTIVPY

SEQ ID NO: 11042 - protein, 20 aa, Artificial Sequence
  Description of Artificial Sequence: targeting sequence/synthetic sequence
VCKDHLASTDQLKSVGLNLE

SEQ ID NO: 11043 - protein, 20 aa, Artificial Sequence
  Description of Artificial Sequence: targeting sequence/synthetic sequence
AGSTMGASMTLTVQARLLLS

SEQ ID NO: 11044 - protein, 20 aa, Artificial Sequence
  Description of Artificial Sequence: targeting sequence/synthetic sequence
AELKPANLPVTQPFTVGDNK

SEQ ID NO: 11045 - protein, 20 aa, Artificial Sequence
  Description of Artificial Sequence: targeting sequence/synthetic sequence
VLHQDWLNGKEYKCKVSNKA

SEQ ID NO: 11046 - protein, 20 aa, Artificial Sequence
  Description of Artificial Sequence: targeting sequence/synthetic sequence
LNGNGDPNNMDRAVKLYRKL

SEQ ID NO: 11047 - protein, 20 aa, Artificial Sequence
  Description of Artificial Sequence: targeting sequence/synthetic sequence
LELNAFRRKHDCALVISGDS

SEQ ID NO: 11048 - protein, 20 aa, Artificial Sequence
  Description of Artificial Sequence: targeting sequence/synthetic sequence
LEPLVPTGSENLKSLYNTTC

SEQ ID NO: 11049 - protein, 20 aa, Artificial Sequence
  Description of Artificial Sequence: targeting sequence/synthetic sequence
LTVVHQDWLNGKEYKCKVSN

SEQ ID NO: 11050 - protein, 20 aa, Artificial Sequence
  Description of Artificial Sequence: targeting sequence/synthetic sequence
EPAKEPAKKSRKHAASDVDL

SEQ ID NO: 11051 - protein, 20 aa, Artificial Sequence
  Description of Artificial Sequence: targeting sequence/synthetic sequence
SPGASVRVSCKTSGYAFHTY

SEQ ID NO: 11052 - protein, 20 aa, Artificial Sequence
  Description of Artificial Sequence: targeting sequence/synthetic sequence
IVNRFDYAQCKKLNMDQVLD

SEQ ID NO: 11053 - protein, 20 aa, Artificial Sequence
  Description of Artificial Sequence: targeting sequence/synthetic sequence
GLLAMAGSAMGATSLTLSAQ

SEQ ID NO: 11054 - protein, 20 aa, Artificial Sequence
  Description of Artificial Sequence: targeting sequence/synthetic sequence
GCQKILTVLDPMVPTGSENL

SEQ ID NO: 11055 - protein, 20 aa, Artificial Sequence
  Description of Artificial Sequence: targeting sequence/synthetic sequence
EIAHGYVEHSVRYQCKNYYK

SEQ ID NO: 11056 - protein, 20 aa, Artificial Sequence
  Description of Artificial Sequence: targeting sequence/synthetic sequence
PRYMSCLRDAEPPSPTPAGP

SEQ ID NO: 11057 - protein, 20 aa, Artificial Sequence
  Description of Artificial Sequence: targeting sequence/synthetic sequence
GASGSFKLNKKASSVETKPG

SEQ ID NO: 11058 - protein, 20 aa, Artificial Sequence
  Description of Artificial Sequence: targeting sequence/synthetic sequence
DHACKRTYSDRGWGNGCGLF

SEQ ID NO: 11059 - protein, 20 aa, Artificial Sequence
  Description of Artificial Sequence: targeting sequence/synthetic sequence
YARGSGASTSNACTLSAIST

SEQ ID NO: 11060 - protein, 20 aa, Artificial Sequence
  Description of Artificial Sequence: targeting sequence/synthetic sequence
LHGVPQGALLEDNREQECEI

SEQ ID NO: 11061 - protein, 20 aa, Artificial Sequence
  Description of Artificial Sequence: targeting sequence/synthetic sequence
RVCRSGSGLVGRQLEEFLNQ

SEQ ID NO: 11062 - protein, 20 aa, Artificial Sequence
  Description of Artificial Sequence: targeting sequence/synthetic sequence
LFEDTNLCAIHAKRVTIMPK

SEQ ID NO: 11063 - protein, 20 aa, Artificial Sequence
  Description of Artificial Sequence: targeting sequence/synthetic sequence
ASKERNGLSLAALKKALAAG

SEQ ID NO: 11064 - protein, 20 aa, Artificial Sequence
  Description of Artificial Sequence: targeting sequence/synthetic sequence
SEEINEKDLRKKSELQGTAL

SEQ ID NO: 11065 - protein, 20 aa, Artificial Sequence
  Description of Artificial Sequence: targeting sequence/synthetic sequence
LVCKDHLASTDQLKSVGLNL

SEQ ID NO: 11066 - protein, 20 aa, Artificial Sequence
  Description of Artificial Sequence: targeting sequence/synthetic sequence
YQEVLSFKPPEPPKPPGSLE

SEQ ID NO: 11067 - protein, 20 aa, Artificial Sequence
  Description of Artificial Sequence: targeting sequence/synthetic sequence
PIVNRFDYAQCKKLNMDQVL

SEQ ID NO: 11068 - protein, 20 aa, Artificial Sequence
  Description of Artificial Sequence: targeting sequence/synthetic sequence
EVHEEELVARRKLPTALDGF

SEQ ID NO: 11069 - protein, 20 aa, Artificial Sequence
  Description of Artificial Sequence: targeting sequence/synthetic sequence
TIQHLKSKFGDGYIVTMKIK

SEQ ID NO: 11070 - protein, 20 aa, Artificial Sequence
  Description of Artificial Sequence: targeting sequence/synthetic sequence
GTIQHLKSKFGDGYIVTMKI

SEQ ID NO: 11071 - protein, 20 aa, Artificial Sequence
  Description of Artificial Sequence: targeting sequence/synthetic sequence
PAIRRLARRGGVKRISGLIY

SEQ ID NO: 11072 - protein, 20 aa, Artificial Sequence
  Description of Artificial Sequence: targeting sequence/synthetic sequence
DSSLLNSTPGTGRPMPGLVQ

SEQ ID NO: 11073 - protein, 20 aa, Artificial Sequence
  Description of Artificial Sequence: targeting sequence/synthetic sequence
VEKNNSRIKLGIKSLVSKGT

SEQ ID NO: 11074 - protein, 20 aa, Artificial Sequence
  Description of Artificial Sequence: targeting sequence/synthetic sequence
GKKKYKLKHLVWASRELERF

SEQ ID NO: 11075 - protein, 20 aa, Artificial Sequence
  Description of Artificial Sequence: targeting sequence/synthetic sequence
ADSSLLNSTPGTGRPMPGLV

SEQ ID NO: 11076 - protein, 20 aa, Artificial Sequence
  Description of Artificial Sequence: targeting sequence/synthetic sequence
RIMNVHEAVNCLETLWYTRV

SEQ ID NO: 11077 - protein, 20 aa, Artificial Sequence
  Description of Artificial Sequence: targeting sequence/synthetic sequence
GTVALREIRRYQKSTELLIR

SEQ ID NO: 11078 - protein, 20 aa, Artificial Sequence
  Description of Artificial Sequence: targeting sequence/synthetic sequence
LPVSPIWEPPPATTSTTPVL

SEQ ID NO: 11079 - protein, 20 aa, Artificial Sequence
  Description of Artificial Sequence: targeting sequence/synthetic sequence
LIVQEKPFTVEISPGPRIAA

SEQ ID NO: 11080 - protein, 20 aa, Artificial Sequence
  Description of Artificial Sequence: targeting sequence/synthetic sequence
CEGFTWSGCGGNSNRFKTIE

SEQ ID NO: 11081 - protein, 20 aa, Artificial Sequence
  Description of Artificial Sequence: targeting sequence/synthetic sequence
KTTIDKISDVSTIVPYIGPA

SEQ ID NO: 11082 - protein, 20 aa, Artificial Sequence
  Description of Artificial Sequence: targeting sequence/synthetic sequence
KLCKDTSHILQTASIQGDRV

SEQ ID NO: 11083 - protein, 20 aa, Artificial Sequence
  Description of Artificial Sequence: targeting sequence/synthetic sequence
TTPQDFHPPTSLKNGDSSYY

SEQ ID NO: 11084 - protein, 20 aa, Artificial Sequence
  Description of Artificial Sequence: targeting sequence/synthetic sequence
PQDGTSTLRENSKPEESHLL

SEQ ID NO: 11085 - protein, 20 aa, Artificial Sequence
  Description of Artificial Sequence: targeting sequence/synthetic sequence
QEVAPPTPLTPTSHTANTSP

SEQ ID NO: 11086 - protein, 20 aa, Artificial Sequence
  Description of Artificial Sequence: targeting sequence/synthetic sequence
YVQRAKAYLEEECPATLRKY

SEQ ID NO: 11087 - protein, 20 aa, Artificial Sequence
  Description of Artificial Sequence: targeting sequence/synthetic sequence
LLKKLQIPIEPKKDDIIHSL

SEQ ID NO: 11088 - protein, 20 aa, Artificial Sequence
  Description of Artificial Sequence: targeting sequence/synthetic sequence
IQKGYMRIQQFRKADGSYAA

SEQ ID NO: 11089 - protein, 20 aa, Artificial Sequence
  Description of Artificial Sequence: targeting sequence/synthetic sequence
RAKAYLEEECPATLRKYLKY

SEQ ID NO: 11090 - protein, 20 aa, Artificial Sequence
  Description of Artificial Sequence: targeting sequence/synthetic sequence
RAGLQFPVGRVHRLLRKGNY

SEQ ID NO: 11091 - protein, 20 aa, Artificial Sequence
  Description of Artificial Sequence: targeting sequence/synthetic sequence
SREIQTAVRLLLPGELAKHA

SEQ ID NO: 11092 - protein, 20 aa, Artificial Sequence
  Description of Artificial Sequence: targeting sequence/synthetic sequence
DQGSLIETGERCVLTVPSTD

SEQ ID NO: 11093 - protein, 20 aa, Artificial Sequence
  Description of Artificial Sequence: targeting sequence/synthetic sequence
ADPKEKWVQNYMKHLGRKAH

SEQ ID NO: 11094 - protein, 20 aa, Artificial Sequence
  Description of Artificial Sequence: targeting sequence/synthetic sequence
GKKHYMMKHLVWASRELERF

SEQ ID NO: 11095 - protein, 20 aa, Artificial Sequence
  Description of Artificial Sequence: targeting sequence/synthetic sequence
TELLIRKLPFQRLVREIAQD

SEQ ID NO: 11096 - protein, 20 aa, Artificial Sequence
  Description of Artificial Sequence: targeting sequence/synthetic sequence
SSRSFFEDLLFDKVKLSDVG

SEQ ID NO: 11097 - protein, 20 aa, Artificial Sequence
  Description of Artificial Sequence: targeting sequence/synthetic sequence
LYSDRGWGNGCGLFGKGSLV

SEQ ID NO: 11098 - protein, 20 aa, Artificial Sequence
  Description of Artificial Sequence: targeting sequence/synthetic sequence
PQGALLEDNREQECEIISFA

SEQ ID NO: 11099 - protein, 20 aa, Artificial Sequence
  Description of Artificial Sequence: targeting sequence/synthetic sequence
STELLIRKLPFQRLVREIAQ

SEQ ID NO: 11100 - protein, 20 aa, Artificial Sequence
  Description of Artificial Sequence: targeting sequence/synthetic sequence
AGYDVEKNNSRIKLGLKSLV

SEQ ID NO: 11101 - protein, 20 aa, Artificial Sequence
  Description of Artificial Sequence: targeting sequence/synthetic sequence
MNYADIGCSVISCGKVFSKM

SEQ ID NO: 11102 - protein, 20 aa, Artificial Sequence
  Description of Artificial Sequence: targeting sequence/synthetic sequence
RGWGNGCGLFGKGSIVACAK

SEQ ID NO: 11103 - protein, 20 aa, Artificial Sequence
  Description of Artificial Sequence: targeting sequence/synthetic sequence
LQSKLLPRLPGLPFLSCQRG

SEQ ID NO: 11104 - protein, 20 aa, Artificial Sequence
  Description of Artificial Sequence: targeting sequence/synthetic sequence
VNVNMRVGIHSGRVHCGVLG

SEQ ID NO: 11105 - protein, 20 aa, Artificial Sequence
  Description of Artificial Sequence: targeting sequence/synthetic sequence
NNMDKAVKLYGKLKREITFH

SEQ ID NO: 11106 - protein, 20 aa, Artificial Sequence
  Description of Artificial Sequence: targeting sequence/synthetic sequence
PEVQFKWYVDGVEVHNAKTK

SEQ ID NO: 11107 - protein, 20 aa, Artificial Sequence
  Description of Artificial Sequence: targeting sequence/synthetic sequence
ALLVLSCKSSCSVGCDLPQT

SEQ ID NO: 11108 - protein, 20 aa, Artificial Sequence
  Description of Artificial Sequence: targeting sequence/synthetic sequence
LVITWETVPEELQNGRGFGY

SEQ ID NO: 11109 - protein, 20 aa, Artificial Sequence
  Description of Artificial Sequence: targeting sequence/synthetic sequence
ELNAFRRKHDCALVISGDSL

SEQ ID NO: 11110 - protein, 20 aa, Artificial Sequence
  Description of Artificial Sequence: targeting sequence/synthetic sequence
QKSTVDKIADISIVVPYIGL

SEQ ID NO: 11111 - protein, 20 aa, Artificial Sequence
  Description of Artificial Sequence: targeting sequence/synthetic sequence
CTPRYMSCLRDAEPPSPTPA

SEQ ID NO: 11112 - protein, 20 aa, Artificial Sequence
  Description of Artificial Sequence: targeting sequence/synthetic sequence
YMRIQQFRKADGSYAAWLSR

SEQ ID NO: 11113 - protein, 20 aa, Artificial Sequence
  Description of Artificial Sequence: targeting sequence/synthetic sequence
TIRRLARHGGVKRILGLIYE

SEQ ID NO: 11114 - protein, 20 aa, Artificial Sequence
  Description of Artificial Sequence: targeting sequence/synthetic sequence
SHEDPEVQFKWYVDGVEVHN

SEQ ID NO: 11115 - protein, 20 aa, Artificial Sequence
  Description of Artificial Sequence: targeting sequence/synthetic sequence
EVTGVNVNMRVGIHSGRVHC

SEQ ID NO: 11116 - protein, 20 aa, Artificial Sequence
  Description of Artificial Sequence: targeting sequence/synthetic sequence
SSSERDGVLALDNFHRWFQP

SEQ ID NO: 11117 - protein, 20 aa, Artificial Sequence
  Description of Artificial Sequence: targeting sequence/synthetic sequence
ALQEACESYLVGLFEDTNLC

SEQ ID NO: 11118 - protein, 20 aa, Artificial Sequence
  Description of Artificial Sequence: targeting sequence/synthetic sequence
SIMRGKKLEPCDRVLFSVGS

SEQ ID NO: 11119 - protein, 20 aa, Artificial Sequence
  Description of Artificial Sequence: targeting sequence/synthetic sequence
VEIDTKSYWKALGISPFHEH

SEQ ID NO: 11120 - protein, 20 aa, Artificial Sequence
  Description of Artificial Sequence: targeting sequence/synthetic sequence
KLYFDLCDLVGDNWDDPEPD

SEQ ID NO: 11121 - protein, 20 aa, Artificial Sequence
  Description of Artificial Sequence: targeting sequence/synthetic sequence
GGMKRKLSVAIAFVGGSRAI

SEQ ID NO: 11122 - protein, 20 aa, Artificial Sequence
  Description of Artificial Sequence: targeting sequence/synthetic sequence
RVMNVHEAVNCLEALWDTQM

SEQ ID NO: 11123 - protein, 20 aa, Artificial Sequence
  Description of Artificial Sequence: targeting sequence/synthetic sequence
SGGNKRKLSTAIALIGYPAF

SEQ ID NO: 11124 - protein, 20 aa, Artificial Sequence
  Description of Artificial Sequence: targeting sequence/synthetic sequence
LPFQRLVREIAQDFKTDLRF

SEQ ID NO: 11125 - protein, 20 aa, Artificial Sequence
  Description of Artificial Sequence: targeting sequence/synthetic sequence
ALQEASEAYLVGLFEDTNLC

SEQ ID NO: 11126 - protein, 20 aa, Artificial Sequence
  Description of Artificial Sequence: targeting sequence/synthetic sequence
EDTLIEILASRTNKEIRDIN

SEQ ID NO: 11127 - protein, 20 aa, Artificial Sequence
  Description of Artificial Sequence: targeting sequence/synthetic sequence
AEVMSPGASVRVSCKTSGYA

SEQ ID NO: 11128 - protein, 20 aa, Artificial Sequence
  Description of Artificial Sequence: targeting sequence/synthetic sequence
VCNSKDGGAWGTEQREAVFP

SEQ ID NO: 11129 - protein, 20 aa, Artificial Sequence
  Description of Artificial Sequence: targeting sequence/synthetic sequence
ASSSPAASLGSQGSGLEQSS

SEQ ID NO: 11130 - protein, 20 aa, Artificial Sequence
  Description of Artificial Sequence: targeting sequence/synthetic sequence
PLVPTGSENLKSLYNTTCVI

SEQ ID NO: 11131 - protein, 20 aa, Artificial Sequence
  Description of Artificial Sequence: targeting sequence/synthetic sequence
RGVTNRGWNNGCGLFGKGDI

SEQ ID NO: 11132 - protein, 20 aa, Artificial Sequence
  Description of Artificial Sequence: targeting sequence/synthetic sequence
PKRGLEVNKCEIARFYKLHE

SEQ ID NO: 11133 - protein, 20 aa, Artificial Sequence
  Description of Artificial Sequence: targeting sequence/synthetic sequence
KNNSRIKLGLKSLVSKGTLV

SEQ ID NO: 11134 - protein, 20 aa, Artificial Sequence
  Description of Artificial Sequence: targeting sequence/synthetic sequence
GCQKIITVLDPLVPTGSENL

SEQ ID NO: 11135 - protein, 20 aa, Artificial Sequence
  Description of Artificial Sequence: targeting sequence/synthetic sequence
EARCISQSGWVNETSPFTEK

SEQ ID NO: 11136 - protein, 20 aa, Artificial Sequence
  Description of Artificial Sequence: targeting sequence/synthetic sequence
YEARCISQSGWVNETSPFTE

SEQ ID NO: 11137 - protein, 20 aa, Artificial Sequence
  Description of Artificial Sequence: targeting sequence/synthetic sequence
EKSEEINEKDLRKKSELQGT

SEQ ID NO: 11138 - protein, 20 aa, Artificial Sequence
  Description of Artificial Sequence: targeting sequence/synthetic sequence
HLEDSPDYCLENKTLGLLGT

SEQ ID NO: 11139 - protein, 20 aa, Artificial Sequence
  Description of Artificial Sequence: targeting sequence/synthetic sequence
QGSLIETGERCVLTVPSTDI

SEQ ID NO: 11140 - protein, 20 aa, Artificial Sequence
  Description of Artificial Sequence: targeting sequence/synthetic sequence
RDECPNEECAISHFAVCDAV

SEQ ID NO: 11141 - protein, 20 aa, Artificial Sequence
  Description of Artificial Sequence: targeting sequence/synthetic sequence
FFFLVLAVLGETLIPHYSGR

SEQ ID NO: 11142 - protein, 20 aa, Artificial Sequence
  Description of Artificial Sequence: targeting sequence/synthetic sequence
LLIRKLPFQRLVREIAQDFK

SEQ ID NO: 11143 - protein, 20 aa, Artificial Sequence
  Description of Artificial Sequence: targeting sequence/synthetic sequence
WLTSKLFPKMPGLPFISCQK

SEQ ID NO: 11144 - protein, 20 aa, Artificial Sequence
  Description of Artificial Sequence: targeting sequence/synthetic sequence
PPTPLTPTSHTANTSPRPVS

SEQ ID NO: 11145 - protein, 20 aa, Artificial Sequence
  Description of Artificial Sequence: targeting sequence/synthetic sequence
ADESVVKEAHREVINSSTEG

SEQ ID NO: 11146 - protein, 20 aa, Artificial Sequence
  Description of Artificial Sequence: targeting sequence/synthetic sequence
YMPKRGLEVNKCEIARFYKL

SEQ ID NO: 11147 - protein, 20 aa, Artificial Sequence
  Description of Artificial Sequence: targeting sequence/synthetic sequence
CNSKDGGAWGTEQREAVFPF

SEQ ID NO: 11148 - protein, 20 aa, Artificial Sequence
  Description of Artificial Sequence: targeting sequence/synthetic sequence
YSDRGWGNGCGLFGKGSIVA

SEQ ID NO: 11149 - protein, 20 aa, Artificial Sequence
  Description of Artificial Sequence: targeting sequence/synthetic sequence
TQVLREAEEHQETQCLRVQR

SEQ ID NO: 11150 - protein, 20 aa, Artificial Sequence
  Description of Artificial Sequence: targeting sequence/synthetic sequence
SPDYCLRNESTGSLGTQGRL

SEQ ID NO: 11151 - protein, 20 aa, Artificial Sequence
  Description of Artificial Sequence: targeting sequence/synthetic sequence
LYFDLCDLVGDNWDDPEPDI

SEQ ID NO: 11152 - protein, 20 aa, Artificial Sequence
  Description of Artificial Sequence: targeting sequence/synthetic sequence
GRGLLKKLQIPIEPKKDDII

SEQ ID NO: 11153 - protein, 20 aa, Artificial Sequence
  Description of Artificial Sequence: targeting sequence/synthetic sequence
GADESVVKEAHREVINSSTE

SEQ ID NO: 11154 - protein, 20 aa, Artificial Sequence
  Description of Artificial Sequence: targeting sequence/synthetic sequence
QVLREAEEHQETQCLRVQRA

SEQ ID NO: 11155 - protein, 20 aa, Artificial Sequence
  Description of Artificial Sequence: targeting sequence/synthetic sequence
TYQEVLSFKPPEPPKPPGSL

SEQ ID NO: 11156 - protein, 20 aa, Artificial Sequence
  Description of Artificial Sequence: targeting sequence/synthetic sequence
ITWETVPEELQNGRGFGYVV

SEQ ID NO: 11157 - protein, 20 aa, Artificial Sequence
  Description of Artificial Sequence: targeting sequence/synthetic sequence
AVGMLGAMFLGFLGAAGSTM

SEQ ID NO: 11158 - protein, 20 aa, Artificial Sequence
  Description of Artificial Sequence: targeting sequence/synthetic sequence
PFLFSGCGGNANRFQTIGEC

SEQ ID NO: 11159 - protein, 20 aa, Artificial Sequence
  Description of Artificial Sequence: targeting sequence/synthetic sequence
QHGEPSLQRVPVAKMVCGPS

SEQ ID NO: 11160 - protein, 20 aa, Artificial Sequence
  Description of Artificial Sequence: targeting sequence/synthetic sequence
NRRDECPNEECAISHFAVCD

SEQ ID NO: 11161 - protein, 20 aa, Artificial Sequence
  Description of Artificial Sequence: targeting sequence/synthetic sequence
PSTGGVKKPHRYRPGTVALR

SEQ ID NO: 11162 - protein, 20 aa, Artificial Sequence
  Description of Artificial Sequence: targeting sequence/synthetic sequence
LEPALKTGSEDLKSLWNAIA

SEQ ID NO: 11163 - protein, 20 aa, Artificial Sequence
  Description of Artificial Sequence: targeting sequence/synthetic sequence
VAAFFFLVLAVLGETLIPHY

SEQ ID NO: 11164 - protein, 20 aa, Artificial Sequence
  Description of Artificial Sequence: targeting sequence/synthetic sequence
IGTNPSDFDPPASLKNGSSA

SEQ ID NO: 11165 - protein, 20 aa, Artificial Sequence
  Description of Artificial Sequence: targeting sequence/synthetic sequence
KSLFNTVATLYCVHQKIEIK

SEQ ID NO: 11166 - protein, 20 aa, Artificial Sequence
  Description of Artificial Sequence: targeting sequence/synthetic sequence
KSLFNTVATLYCVHQRIEVK

SEQ ID NO: 11167 - protein, 20 aa, Artificial Sequence
  Description of Artificial Sequence: targeting sequence/synthetic sequence
DMGKIVYSWVIRRDSKIPGT

SEQ ID NO: 11168 - protein, 20 aa, Artificial Sequence
  Description of Artificial Sequence: targeting sequence/synthetic sequence
GIYKVEIDTKSYWKALGISP

SEQ ID NO: 11169 - protein, 20 aa, Artificial Sequence
  Description of Artificial Sequence: targeting sequence/synthetic sequence
LAPLVPTGSENLKSLFNTVC

SEQ ID NO: 11170 - protein, 20 aa, Artificial Sequence
  Description of Artificial Sequence: targeting sequence/synthetic sequence
QNPQHGEPSLQRVPVAKMVC

SEQ ID NO: 11171 - protein, 20 aa, Artificial Sequence
  Description of Artificial Sequence: targeting sequence/synthetic sequence
LLRVMNYADIGCSVISCGKV

SEQ ID NO: 11172 - protein, 20 aa, Artificial Sequence
  Description of Artificial Sequence: targeting sequence/synthetic sequence
ASEAYLVGLLEDTNLCAIHA

SEQ ID NO: 11173 - protein, 20 aa, Artificial Sequence
  Description of Artificial Sequence: targeting sequence/synthetic sequence
LFKKLNFKRLGAGMLEPPFK

SEQ ID NO: 11174 - protein, 20 aa, Artificial Sequence
  Description of Artificial Sequence: targeting sequence/synthetic sequence
GGVKKPHRYRPGTVALREIR

SEQ ID NO: 11175 - protein, 20 aa, Artificial Sequence
  Description of Artificial Sequence: targeting sequence/synthetic sequence
GNHCGFFGKGSIVACAKFEC

SEQ ID NO: 11176 - protein, 20 aa, Artificial Sequence
  Description of Artificial Sequence: targeting sequence/synthetic sequence
CGSSSRSFFEDLLFDKVKLS

SEQ ID NO: 11177 - protein, 20 aa, Artificial Sequence
  Description of Artificial Sequence: targeting sequence/synthetic sequence
RDGVLALDNFHRWFQPAIPS

SEQ ID NO: 11178 - protein, 20 aa, Artificial Sequence
  Description of Artificial Sequence: targeting sequence/synthetic sequence
FPSVYAWERKKISNCVADYS

SEQ ID NO: 11179 - protein, 20 aa, Artificial Sequence
  Description of Artificial Sequence: targeting sequence/synthetic sequence
GDSNNMDRAVKLYRKLKREI

SEQ ID NO: 11180 - protein, 20 aa, Artificial Sequence
  Description of Artificial Sequence: targeting sequence/synthetic sequence
AYARGSGASTSNACTLSAIS

SEQ ID NO: 11181 - protein, 20 aa, Artificial Sequence
  Description of Artificial Sequence: targeting sequence/synthetic sequence
KEICADPKEKWVQNYMKHLG

SEQ ID NO: 11182 - protein, 20 aa, Artificial Sequence
  Description of Artificial Sequence: targeting sequence/synthetic sequence
IMRGKKLEPCDRVLFSVGST

SEQ ID NO: 11183 - protein, 20 aa, Artificial Sequence
  Description of Artificial Sequence: targeting sequence/synthetic sequence
KCAEPMRAPKGLAFAEIQAR

SEQ ID NO: 11184 - protein, 20 aa, Artificial Sequence
  Description of Artificial Sequence: targeting sequence/synthetic sequence
TKCAEPMRAPKGLAFAEIQA

SEQ ID NO: 11185 - protein, 20 aa, Artificial Sequence
  Description of Artificial Sequence: targeting sequence/synthetic sequence
QTLSGGMKRKLSVAIAFVGG

SEQ ID NO: 11186 - protein, 20 aa, Artificial Sequence
  Description of Artificial Sequence: targeting sequence/synthetic sequence
KEHPLFKKLNFKRLGAGMLE

SEQ ID NO: 11187 - protein, 20 aa, Artificial Sequence
  Description of Artificial Sequence: targeting sequence/synthetic sequence
PSVYAWERKKISNCVADYSV

SEQ ID NO: 11188 - protein, 20 aa, Artificial Sequence
  Description of Artificial Sequence: targeting sequence/synthetic sequence
PEPEDQVETQGTSGASVPPH

SEQ ID NO: 11189 - protein, 20 aa, Artificial Sequence
  Description of Artificial Sequence: targeting sequence/synthetic sequence
GTDEDTLIEILASRTNKEIR

SEQ ID NO: 11190 - protein, 20 aa, Artificial Sequence
  Description of Artificial Sequence: targeting sequence/synthetic sequence
APPTPLTPTSHTANTSPRPV

SEQ ID NO: 11191 - protein, 20 aa, Artificial Sequence
  Description of Artificial Sequence: targeting sequence/synthetic sequence
LLMALVVLSCKSSCSLDCDL

SEQ ID NO: 11192 - protein, 20 aa, Artificial Sequence
  Description of Artificial Sequence: targeting sequence/synthetic sequence
ELVITWESIPEELQNGEGFG

SEQ ID NO: 11193 - protein, 20 aa, Artificial Sequence
  Description of Artificial Sequence: targeting sequence/synthetic sequence
EDQVETQGTSGASVPPHQSS

SEQ ID NO: 11194 - protein, 20 aa, Artificial Sequence
  Description of Artificial Sequence: targeting sequence/synthetic sequence
NLDMGKIVYSWVIRRDSKIP

SEQ ID NO: 11195 - protein, 20 aa, Artificial Sequence
  Description of Artificial Sequence: targeting sequence/synthetic sequence
YVDGVEVHNAKTKPREEQYN

SEQ ID NO: 11196 - protein, 20 aa, Artificial Sequence
  Description of Artificial Sequence: targeting sequence/synthetic sequence
QLQPSLQTGSEELRSLYNTV

SEQ ID NO: 11197 - protein, 20 aa, Artificial Sequence
  Description of Artificial Sequence: targeting sequence/synthetic sequence
IGQLQPAIQTGTEELRSLYN

SEQ ID NO: 11198 - protein, 20 aa, Artificial Sequence
  Description of Artificial Sequence: targeting sequence/synthetic sequence
QIADSQHQSHRQMVTTTNPL

SEQ ID NO: 11199 - protein, 20 aa, Artificial Sequence
  Description of Artificial Sequence: targeting sequence/synthetic sequence
ATLGADLVDSTDNTKINRGI

SEQ ID NO: 11200 - protein, 20 aa, Artificial Sequence
  Description of Artificial Sequence: targeting sequence/synthetic sequence
SATVSSPGSVPEVQDIQQNT

SEQ ID NO: 11201 - protein, 20 aa, Artificial Sequence
  Description of Artificial Sequence: targeting sequence/synthetic sequence
LSAGPGTSGSHLDRSTVSSF

SEQ ID NO: 11202 - protein, 20 aa, Artificial Sequence
  Description of Artificial Sequence: targeting sequence/synthetic sequence
ALMASGSGGHNTMPSGGNSV

SEQ ID NO: 11203 - protein, 20 aa, Artificial Sequence
  Description of Artificial Sequence: targeting sequence/synthetic sequence
GDCGLGTREGTRTGAECKQT

SEQ ID NO: 11204 - protein, 20 aa, Artificial Sequence
  Description of Artificial Sequence: targeting sequence/synthetic sequence
GSPASGIPVKVSATVSSPGS

SEQ ID NO: 11205 - protein, 20 aa, Artificial Sequence
  Description of Artificial Sequence: targeting sequence/synthetic sequence
SLTQSDISHIGSMRVEGIVH

SEQ ID NO: 11206 - protein, 20 aa, Artificial Sequence
  Description of Artificial Sequence: targeting sequence/synthetic sequence
SVKKVDDKVTLYKTTATADS

SEQ ID NO: 11207 - protein, 20 aa, Artificial Sequence
  Description of Artificial Sequence: targeting sequence/synthetic sequence
INIAIEKLNDRISHDEQAIR

SEQ ID NO: 11208 - protein, 20 aa, Artificial Sequence
  Description of Artificial Sequence: targeting sequence/synthetic sequence
MVTVSSASTKGPSVFPLAPS

SEQ ID NO: 11209 - protein, 20 aa, Artificial Sequence
  Description of Artificial Sequence: targeting sequence/synthetic sequence
NREQANLNSRTEETIKFAAA

SEQ ID NO: 11210 - protein, 20 aa, Artificial Sequence
  Description of Artificial Sequence: targeting sequence/synthetic sequence
TSMGGTQQQFVEGVRMEEIV

SEQ ID NO: 11211 - protein, 20 aa, Artificial Sequence
  Description of Artificial Sequence: targeting sequence/synthetic sequence
MVRVADTVQTSATNSERVPN

SEQ ID NO: 11212 - protein, 20 aa, Artificial Sequence
  Description of Artificial Sequence: targeting sequence/synthetic sequence
SVLGTGTGGSGGFHLAQQAS

SEQ ID NO: 11213 - protein, 20 aa, Artificial Sequence
  Description of Artificial Sequence: targeting sequence/synthetic sequence
HTTEERGLNVTLSSTGRNGF

SEQ ID NO: 11214 - protein, 20 aa, Artificial Sequence
  Description of Artificial Sequence: targeting sequence/synthetic sequence
NTITSFVDRGLDDLSHTPLR

SEQ ID NO: 11215 - protein, 20 aa, Artificial Sequence
  Description of Artificial Sequence: targeting sequence/synthetic sequence
EKMLVLDAEQRVTAGEALAH

SEQ ID NO: 11216 - protein, 20 aa, Artificial Sequence
  Description of Artificial Sequence: targeting sequence/synthetic sequence
NIAIEKLNDRITHDEQAIRD

SEQ ID NO: 11217 - protein, 20 aa, Artificial Sequence
  Description of Artificial Sequence: targeting sequence/synthetic sequence
TALQDSSKRKQLVSDGLLDS

SEQ ID NO: 11218 - protein, 20 aa, Artificial Sequence
  Description of Artificial Sequence: targeting sequence/synthetic sequence
LLPGELAKHAVSEGTKAVSK

SEQ ID NO: 11219 - protein, 20 aa, Artificial Sequence
  Description of Artificial Sequence: targeting sequence/synthetic sequence
PVGDAVSKVLQIEKEGAIHR

SEQ ID NO: 11220 - protein, 20 aa, Artificial Sequence
  Description of Artificial Sequence: targeting sequence/synthetic sequence
SGSPASGIPVKVSATVSSPG

SEQ ID NO: 11221 - protein, 20 aa, Artificial Sequence
  Description of Artificial Sequence: targeting sequence/synthetic sequence
LLLGGLTMGGIAAGVGTGTT

SEQ ID NO: 11222 - protein, 20 aa, Artificial Sequence
  Description of Artificial Sequence: targeting sequence/synthetic sequence
HGIYTDVGEKGSQLAAGQKQ

SEQ ID NO: 11223 - protein, 20 aa, Artificial Sequence
  Description of Artificial Sequence: targeting sequence/synthetic sequence
QHLEALSAGPGTSGSHLDRS

SEQ ID NO: 11224 - protein, 20 aa, Artificial Sequence
  Description of Artificial Sequence: targeting sequence/synthetic sequence
PPTSGSATIYGHDIRTEMDE

SEQ ID NO: 11225 - protein, 20 aa, Artificial Sequence
  Description of Artificial Sequence: targeting sequence/synthetic sequence
VLSQVQLQESGPGLVKPSGT

SEQ ID NO: 11226 - protein, 20 aa, Artificial Sequence
  Description of Artificial Sequence: targeting sequence/synthetic sequence
RTSMGGTQQQFVEGVRMEEI

SEQ ID NO: 11227 - protein, 20 aa, Artificial Sequence
  Description of Artificial Sequence: targeting sequence/synthetic sequence
SLGYKKAEDEMSRATSVGDQ

SEQ ID NO: 11228 - protein, 20 aa, Artificial Sequence
  Description of Artificial Sequence: targeting sequence/synthetic sequence
LHNHYTQKSLSLSPELQLEE

SEQ ID NO: 11229 - protein, 20 aa, Artificial Sequence
  Description of Artificial Sequence: targeting sequence/synthetic sequence
EQANLNSRTEETIKFAAAHY

SEQ ID NO: 11230 - protein, 20 aa, Artificial Sequence
  Description of Artificial Sequence: targeting sequence/synthetic sequence
CCSDGKTPSLDAEGSNCPAT

SEQ ID NO: 11231 - protein, 20 aa, Artificial Sequence
  Description of Artificial Sequence: targeting sequence/synthetic sequence
LLLTSALAGQRQGTQAESNL

SEQ ID NO: 11232 - protein, 20 aa, Artificial Sequence
  Description of Artificial Sequence: targeting sequence/synthetic sequence
DSSKRKQLVSDGLLDSVPGV

SEQ ID NO: 11233 - protein, 20 aa, Artificial Sequence
  Description of Artificial Sequence: targeting sequence/synthetic sequence
TAGSAMGAASLTVSAQSRTL

SEQ ID NO: 11234 - protein, 20 aa, Artificial Sequence
  Description of Artificial Sequence: targeting sequence/synthetic sequence
LLTSALAGQRQGTQAESNLS

SEQ ID NO: 11235 - protein, 20 aa, Artificial Sequence
  Description of Artificial Sequence: targeting sequence/synthetic sequence
SLLEKQIENLRAADNATQEK

SEQ ID NO: 11236 - protein, 20 aa, Artificial Sequence
  Description of Artificial Sequence: targeting sequence/synthetic sequence
AAFQLTQGDQLSTHTDGIPH

SEQ ID NO: 11237 - protein, 20 aa, Artificial Sequence
  Description of Artificial Sequence: targeting sequence/synthetic sequence
MIQTAHVGVGISGNEGMQAT

SEQ ID NO: 11238 - protein, 20 aa, Artificial Sequence
  Description of Artificial Sequence: targeting sequence/synthetic sequence
NSALGCCSDGKTPSLDAEGS

SEQ ID NO: 11239 - protein, 20 aa, Artificial Sequence
  Description of Artificial Sequence: targeting sequence/synthetic sequence
NLPDTKASGPAHSKEVPTLT

SEQ ID NO: 11240 - protein, 20 aa, Artificial Sequence
  Description of Artificial Sequence: targeting sequence/synthetic sequence
LPGAQGLPGVGLTPSAAQTA

SEQ ID NO: 11241 - protein, 20 aa, Artificial Sequence
  Description of Artificial Sequence: targeting sequence/synthetic sequence
TLGADLVDSTDNTKINRGIF

SEQ ID NO: 11242 - protein, 20 aa, Artificial Sequence
  Description of Artificial Sequence: targeting sequence/synthetic sequence
SRATSVGDQLEAPARTIYLN

SEQ ID NO: 11243 - protein, 20 aa, Artificial Sequence
  Description of Artificial Sequence: targeting sequence/synthetic sequence
DMYLLHMEEERKNNSNSSFD

SEQ ID NO: 11244 - protein, 20 aa, Artificial Sequence
  Description of Artificial Sequence: targeting sequence/synthetic sequence
QLTQGDQLSTHTDGIPHLVL

SEQ ID NO: 11245 - protein, 20 aa, Artificial Sequence
  Description of Artificial Sequence: targeting sequence/synthetic sequence
WIASHTTEERGLNVTLSSTG

SEQ ID NO: 11246 - protein, 20 aa, Artificial Sequence
  Description of Artificial Sequence: targeting sequence/synthetic sequence
HNNQLLAGGLHAGKVIKGEE

SEQ ID NO: 11247 - protein, 20 aa, Artificial Sequence
  Description of Artificial Sequence: targeting sequence/synthetic sequence
QQGVPHGYAFSQEEHGAVSQ

SEQ ID NO: 11248 - protein, 20 aa, Artificial Sequence
  Description of Artificial Sequence: targeting sequence/synthetic sequence
ALAIGAGVAGGITGSMSLAS

SEQ ID NO: 11249 - protein, 20 aa, Artificial Sequence
  Description of Artificial Sequence: targeting sequence/synthetic sequence
DRVKDLATVYVDVLKDSGRD

SEQ ID NO: 11250 - protein, 20 aa, Artificial Sequence
  Description of Artificial Sequence: targeting sequence/synthetic sequence
EQIADSQHRSLRQMVATTNP

SEQ ID NO: 11251 - protein, 20 aa, Artificial Sequence
  Description of Artificial Sequence: targeting sequence/synthetic sequence
KLNDRITHDEQAIRDLTLEI

SEQ ID NO: 11252 - protein, 20 aa, Artificial Sequence
  Description of Artificial Sequence: targeting sequence/synthetic sequence
NNQLLAGGLHAGKVIKGEEI

SEQ ID NO: 11253 - protein, 20 aa, Artificial Sequence
  Description of Artificial Sequence: targeting sequence/synthetic sequence
LFPPTSGSATIYGHDIRTEM

SEQ ID NO: 11254 - protein, 20 aa, Artificial Sequence
  Description of Artificial Sequence: targeting sequence/synthetic sequence
SLTSDSQSGIMLSSVGTSKC

SEQ ID NO: 11255 - protein, 20 aa, Artificial Sequence
  Description of Artificial Sequence: targeting sequence/synthetic sequence
TMPNSSQSSHSSSGTLSSLE

SEQ ID NO: 11256 - protein, 20 aa, Artificial Sequence
  Description of Artificial Sequence: targeting sequence/synthetic sequence
AQGLPGVGLTPSAAQTARQH

SEQ ID NO: 11257 - protein, 20 aa, Artificial Sequence
  Description of Artificial Sequence: targeting sequence/synthetic sequence
RQILGQLQPSLQTGSEELKS

SEQ ID NO: 11258 - protein, 20 aa, Artificial Sequence
  Description of Artificial Sequence: targeting sequence/synthetic sequence
LEDQRVVKEEEAIALAEKYG

SEQ ID NO: 11259 - protein, 20 aa, Artificial Sequence
  Description of Artificial Sequence: targeting sequence/synthetic sequence
VLTALQDSSKRKQLVSDGLL

SEQ ID NO: 11260 - protein, 20 aa, Artificial Sequence
  Description of Artificial Sequence: targeting sequence/synthetic sequence
DLTGRQDTSRMSTSQIPGRV

SEQ ID NO: 11261 - protein, 20 aa, Artificial Sequence
  Description of Artificial Sequence: targeting sequence/synthetic sequence
VGVGISGNEGMQATNNSDYA

SEQ ID NO: 11262 - protein, 20 aa, Artificial Sequence
  Description of Artificial Sequence: targeting sequence/synthetic sequence
VGISGNEGMQATNNSDYAIA

SEQ ID NO: 11263 - protein, 20 aa, Artificial Sequence
  Description of Artificial Sequence: targeting sequence/synthetic sequence
QSSLQTGSEELKSLYNAVVV

SEQ ID NO: 11264 - protein, 20 aa, Artificial Sequence
  Description of Artificial Sequence: targeting sequence/synthetic sequence
TSDSQSGIMLSSVGTSKCNS

SEQ ID NO: 11265 - protein, 20 aa, Artificial Sequence
  Description of Artificial Sequence: targeting sequence/synthetic sequence
IEWLKVKILPEVKEKHEFLN

SEQ ID NO: 11266 - protein, 20 aa, Artificial Sequence
  Description of Artificial Sequence: targeting sequence/synthetic sequence
GGLTMGGIAAGVGTGTTALV

SEQ ID NO: 11267 - protein, 20 aa, Artificial Sequence
  Description of Artificial Sequence: targeting sequence/synthetic sequence
AATGAQSQVHLVQSGAEVMS

SEQ ID NO: 11268 - protein, 20 aa, Artificial Sequence
  Description of Artificial Sequence: targeting sequence/synthetic sequence
ILGQLQPALKTGTEDLQSLY

SEQ ID NO: 11269 - protein, 20 aa, Artificial Sequence
  Description of Artificial Sequence: targeting sequence/synthetic sequence
AMGRVADTIARGPSNSEQIP

SEQ ID NO: 11270 - protein, 20 aa, Artificial Sequence
  Description of Artificial Sequence: targeting sequence/synthetic sequence
SSLGYKKAEDEMSRATSVGD

SEQ ID NO: 11271 - protein, 20 aa, Artificial Sequence
  Description of Artificial Sequence: targeting sequence/synthetic sequence
LTGAVQTLSQISDINDENLQ

SEQ ID NO: 11272 - protein, 20 aa, Artificial Sequence
  Description of Artificial Sequence: targeting sequence/synthetic sequence
VKVSATVSSPGSVPEVQDIQ

SEQ ID NO: 11273 - protein, 20 aa, Artificial Sequence
  Description of Artificial Sequence: targeting sequence/synthetic sequence
PGTPGPQGIAGQRGVVGLPG

SEQ ID NO: 11274 - protein, 20 aa, Artificial Sequence
  Description of Artificial Sequence: targeting sequence/synthetic sequence
GTTVTVSSASPTSPKVFPLS

SEQ ID NO: 11275 - protein, 20 aa, Artificial Sequence
  Description of Artificial Sequence: targeting sequence/synthetic sequence
GFLGAAGSTMGAAAITLTAQ

SEQ ID NO: 11276 - protein, 20 aa, Artificial Sequence
  Description of Artificial Sequence: targeting sequence/synthetic sequence
NLTATLGADLVDSTDNTKIN

SEQ ID NO: 11277 - protein, 20 aa, Artificial Sequence
  Description of Artificial Sequence: targeting sequence/synthetic sequence
QSNLPDTKASGPAHSKEVPT

SEQ ID NO: 11278 - protein, 20 aa, Artificial Sequence
  Description of Artificial Sequence: targeting sequence/synthetic sequence
FLATAGSAMGAASLTVSAQS

SEQ ID NO: 11279 - protein, 20 aa, Artificial Sequence
  Description of Artificial Sequence: targeting sequence/synthetic sequence
VTSMGSSMPPSPSNGSSFSL

SEQ ID NO: 11280 - protein, 20 aa, Artificial Sequence
  Description of Artificial Sequence: targeting sequence/synthetic sequence
QLQPAIQTGTEELRSLYNTV

SEQ ID NO: 11281 - protein, 20 aa, Artificial Sequence
  Description of Artificial Sequence: targeting sequence/synthetic sequence
SGSATIYGHDIRTEMDEIRK

SEQ ID NO: 11282 - protein, 20 aa, Artificial Sequence
  Description of Artificial Sequence: targeting sequence/synthetic sequence
LVAAATGAQSQVHLVQSGAE

SEQ ID NO: 11283 - protein, 20 aa, Artificial Sequence
  Description of Artificial Sequence: targeting sequence/synthetic sequence
GGTVTNPGGSGTSSRLEPRE

SEQ ID NO: 11284 - protein, 20 aa, Artificial Sequence
  Description of Artificial Sequence: targeting sequence/synthetic sequence
GVPVTVSSASPTSPKVFPLS

SEQ ID NO: 11285 - protein, 20 aa, Artificial Sequence
  Description of Artificial Sequence: targeting sequence/synthetic sequence
EAHLAEENEGDNACKRTYSD

SEQ ID NO: 11286 - protein, 20 aa, Artificial Sequence
  Description of Artificial Sequence: targeting sequence/synthetic sequence
DRISHDEQAIRDLTLEIENA

SEQ ID NO: 11287 - protein, 20 aa, Artificial Sequence
  Description of Artificial Sequence: targeting sequence/synthetic sequence
AMVRVADTVQTSATNSERVP

SEQ ID NO: 11288 - protein, 20 aa, Artificial Sequence
  Description of Artificial Sequence: targeting sequence/synthetic sequence
ALAMGAGVAGGITGSMSLAS

SEQ ID NO: 11289 - protein, 20 aa, Artificial Sequence
  Description of Artificial Sequence: targeting sequence/synthetic sequence
VLSRLQLQESGPGLLKPSVT

SEQ ID NO: 11290 - protein, 20 aa, Artificial Sequence
  Description of Artificial Sequence: targeting sequence/synthetic sequence
VNIGIHGSISAEAKACEEKK

SEQ ID NO: 11291 - protein, 20 aa, Artificial Sequence
  Description of Artificial Sequence: targeting sequence/synthetic sequence
VTNPGGSGTSSRLEPRERME

SEQ ID NO: 11292 - protein, 20 aa, Artificial Sequence
  Description of Artificial Sequence: targeting sequence/synthetic sequence
SSDLTGRQDTSRMSTSQIPG

SEQ ID NO: 11293 - protein, 20 aa, Artificial Sequence
  Description of Artificial Sequence: targeting sequence/synthetic sequence
NPQSRSVPPSASHVAPTETF

SEQ ID NO: 11294 - protein, 20 aa, Artificial Sequence
  Description of Artificial Sequence: targeting sequence/synthetic sequence
ITSFVDRGLDDLSHTPLRRQ

SEQ ID NO: 11295 - protein, 20 aa, Artificial Sequence
  Description of Artificial Sequence: targeting sequence/synthetic sequence
TQIQPSIQTGSEEIKSLYNT

SEQ ID NO: 11296 - protein, 20 aa, Artificial Sequence
  Description of Artificial Sequence: targeting sequence/synthetic sequence
AAIGRVADTVGTGPTNSEAI

SEQ ID NO: 11297 - protein, 20 aa, Artificial Sequence
  Description of Artificial Sequence: targeting sequence/synthetic sequence
QKETQSGAQREMGPVASADK

SEQ ID NO: 11298 - protein, 20 aa, Artificial Sequence
  Description of Artificial Sequence: targeting sequence/synthetic sequence
TSHMESEELNGAYKAIPVAQ

SEQ ID NO: 11299 - protein, 20 aa, Artificial Sequence
  Description of Artificial Sequence: targeting sequence/synthetic sequence
YSLTGAVQTLSQISDINDER

SEQ ID NO: 11300 - protein, 20 aa, Artificial Sequence
  Description of Artificial Sequence: targeting sequence/synthetic sequence
PGLQGIKGDQGDHGVPGAKG

SEQ ID NO: 11301 - protein, 20 aa, Artificial Sequence
  Description of Artificial Sequence: targeting sequence/synthetic sequence
RITHDEQAIRDLTLEIENAR

SEQ ID NO: 11302 - protein, 20 aa, Artificial Sequence
  Description of Artificial Sequence: targeting sequence/synthetic sequence
PQERTLTLVDTGIGMTKADL

SEQ ID NO: 11303 - protein, 20 aa, Artificial Sequence
  Description of Artificial Sequence: targeting sequence/synthetic sequence
VTESASVMPSQDVSGSEDTF

SEQ ID NO: 11304 - protein, 20 aa, Artificial Sequence
  Description of Artificial Sequence: targeting sequence/synthetic sequence
TRVMVPPSSMDVTVGESIVL

SEQ ID NO: 11305 - protein, 20 aa, Artificial Sequence
  Description of Artificial Sequence: targeting sequence/synthetic sequence
QLLAGGLHAGKVIKGEEISV

SEQ ID NO: 11306 - protein, 20 aa, Artificial Sequence
  Description of Artificial Sequence: targeting sequence/synthetic sequence
QVTALPVNSPMNKGDTEVMK

SEQ ID NO: 11307 - protein, 20 aa, Artificial Sequence
  Description of Artificial Sequence: targeting sequence/synthetic sequence
DFKLSSSGDKIIVNLNNNIL

SEQ ID NO: 11308 - protein, 20 aa, Artificial Sequence
  Description of Artificial Sequence: targeting sequence/synthetic sequence
HLAEENEGDNACKRTYSDRG

SEQ ID NO: 11309 - protein, 20 aa, Artificial Sequence
  Description of Artificial Sequence: targeting sequence/synthetic sequence
GAGEARASTGSSDSSPGGHG

SEQ ID NO: 11310 - protein, 20 aa, Artificial Sequence
  Description of Artificial Sequence: targeting sequence/synthetic sequence
PSQDASGDLYTTSSQLTLPA

SEQ ID NO: 11311 - protein, 20 aa, Artificial Sequence
  Description of Artificial Sequence: targeting sequence/synthetic sequence
KAAPAPQEATATFNSTADRE

SEQ ID NO: 11312 - protein, 20 aa, Artificial Sequence
  Description of Artificial Sequence: targeting sequence/synthetic sequence
PAPQEATATFNSTADREDGH

SEQ ID NO: 11313 - protein, 20 aa, Artificial Sequence
  Description of Artificial Sequence: targeting sequence/synthetic sequence
KTLSLPELEQQQEQQQEQQQ

SEQ ID NO: 11314 - protein, 20 aa, Artificial Sequence
  Description of Artificial Sequence: targeting sequence/synthetic sequence
VLDAEQRVTAGEALAHPYFE

SEQ ID NO: 11315 - protein, 20 aa, Artificial Sequence
  Description of Artificial Sequence: targeting sequence/synthetic sequence
GITGQSGLPGLPGQQGAPGI

SEQ ID NO: 11316 - protein, 20 aa, Artificial Sequence
  Description of Artificial Sequence: targeting sequence/synthetic sequence
YNPQSRSVPPSASHVAPTET

SEQ ID NO: 11317 - protein, 20 aa, Artificial Sequence
  Description of Artificial Sequence: targeting sequence/synthetic sequence
TEACNAAKGLEWVSNKISKF

SEQ ID NO: 11318 - protein, 20 aa, Artificial Sequence
  Description of Artificial Sequence: targeting sequence/synthetic sequence
CLKNGAGDVAFVKHSTIFEN

SEQ ID NO: 11319 - protein, 20 aa, Artificial Sequence
  Description of Artificial Sequence: targeting sequence/synthetic sequence
EMSRATSVGDQLEAPARTIY

SEQ ID NO: 11320 - protein, 20 aa, Artificial Sequence
  Description of Artificial Sequence: targeting sequence/synthetic sequence
DSREHMGAASITLTVQARQL

SEQ ID NO: 11321 - protein, 20 aa, Artificial Sequence
  Description of Artificial Sequence: targeting sequence/synthetic sequence
ELAELRESTSQMHTASSLEK

SEQ ID NO: 11322 - protein, 20 aa, Artificial Sequence
  Description of Artificial Sequence: targeting sequence/synthetic sequence
STSTMPNSSQSSHSSSGTLS

SEQ ID NO: 11323 - protein, 20 aa, Artificial Sequence
  Description of Artificial Sequence: targeting sequence/synthetic sequence
LTATLGADLVDSTDNTKINR

SEQ ID NO: 11324 - protein, 20 aa, Artificial Sequence
  Description of Artificial Sequence: targeting sequence/synthetic sequence
SGDCGLGTREGTRTGAECKQ

SEQ ID NO: 11325 - protein, 20 aa, Artificial Sequence
  Description of Artificial Sequence: targeting sequence/synthetic sequence
ELGGGPGAGSLQPLALEGSL

SEQ ID NO: 11326 - protein, 20 aa, Artificial Sequence
  Description of Artificial Sequence: targeting sequence/synthetic sequence
TIITMPTESDFLMQVDGKPK

SEQ ID NO: 11327 - protein, 20 aa, Artificial Sequence
  Description of Artificial Sequence: targeting sequence/synthetic sequence
DAQHRSHRQMATTTNPLIRH

SEQ ID NO: 11328 - protein, 20 aa, Artificial Sequence
  Description of Artificial Sequence: targeting sequence/synthetic sequence
SDLEDQRVVKEEEAIALAEK

SEQ ID NO: 11329 - protein, 20 aa, Artificial Sequence
  Description of Artificial Sequence: targeting sequence/synthetic sequence
NGITGETTTTEYSNARYVSQ

SEQ ID NO: 11330 - protein, 20 aa, Artificial Sequence
  Description of Artificial Sequence: targeting sequence/synthetic sequence
NPGGSGTSSRLEPRERMEPT

SEQ ID NO: 11331 - protein, 20 aa, Artificial Sequence
  Description of Artificial Sequence: targeting sequence/synthetic sequence
ELKREPAVGEPAEVTTTVLV

SEQ ID NO: 11332 - protein, 20 aa, Artificial Sequence
  Description of Artificial Sequence: targeting sequence/synthetic sequence
EELNQLLKGVTIASGGVLPN

SEQ ID NO: 11333 - protein, 20 aa, Artificial Sequence
  Description of Artificial Sequence: targeting sequence/synthetic sequence
NDFKLSSSGDKIIVNLNNNI

SEQ ID NO: 11334 - protein, 20 aa, Artificial Sequence
  Description of Artificial Sequence: targeting sequence/synthetic sequence
RLATSSASSQSHTFISSVES

SEQ ID NO: 11335 - protein, 20 aa, Artificial Sequence
  Description of Artificial Sequence: targeting sequence/synthetic sequence
PTRVMVPPSSMDVTVGESIV

SEQ ID NO: 11336 - protein, 20 aa, Artificial Sequence
  Description of Artificial Sequence: targeting sequence/synthetic sequence
LQKELAELRESTSQMHTASS

SEQ ID NO: 11337 - protein, 20 aa, Artificial Sequence
  Description of Artificial Sequence: targeting sequence/synthetic sequence
TSSASSQSHTFISSVESECH

SEQ ID NO: 11338 - protein, 20 aa, Artificial Sequence
  Description of Artificial Sequence: targeting sequence/synthetic sequence
EGRAVVLTSHSMEECEALCT

SEQ ID NO: 11339 - protein, 20 aa, Artificial Sequence
  Description of Artificial Sequence: targeting sequence/synthetic sequence
ATIYERAGRVEGRNGSITQI

SEQ ID NO: 11340 - protein, 20 aa, Artificial Sequence
  Description of Artificial Sequence: targeting sequence/synthetic sequence
VPGIPGPQGSPGLPGDKGAK

SEQ ID NO: 11341 - protein, 20 aa, Artificial Sequence
  Description of Artificial Sequence: targeting sequence/synthetic sequence
KGAQGLPGITGQSGLPGLPG

SEQ ID NO: 11342 - protein, 20 aa, Artificial Sequence
  Description of Artificial Sequence: targeting sequence/synthetic sequence
SNNQPQNVDSVCSGTLQKTE

SEQ ID NO: 11343 - protein, 20 aa, Artificial Sequence
  Description of Artificial Sequence: targeting sequence/synthetic sequence
ALVDTSGYNAEVRVGDNVQL

SEQ ID NO: 11344 - protein, 20 aa, Artificial Sequence
  Description of Artificial Sequence: targeting sequence/synthetic sequence
TVDKRSTTRDALDAGVDGIM

SEQ ID NO: 11345 - protein, 20 aa, Artificial Sequence
  Description of Artificial Sequence: targeting sequence/synthetic sequence
DLATIYERAGRVEGRNGSIT

SEQ ID NO: 11346 - protein, 20 aa, Artificial Sequence
  Description of Artificial Sequence: targeting sequence/synthetic sequence
GVPPKVVNYEAGEWAENCYN

SEQ ID NO: 11347 - protein, 20 aa, Artificial Sequence
  Description of Artificial Sequence: targeting sequence/synthetic sequence
STMGAAAVTLTVQARQLLPG

SEQ ID NO: 11348 - protein, 20 aa, Artificial Sequence
  Description of Artificial Sequence: targeting sequence/synthetic sequence
DLQVGQVELGGGPGAGSLQP

SEQ ID NO: 11349 - protein, 20 aa, Artificial Sequence
  Description of Artificial Sequence: targeting sequence/synthetic sequence
PQEDSLLHGQFSQAVTPLAH

SEQ ID NO: 11350 - protein, 20 aa, Artificial Sequence
  Description of Artificial Sequence: targeting sequence/synthetic sequence
SHMESEELNGAYKAIPVAQD

SEQ ID NO: 11351 - protein, 20 aa, Artificial Sequence
  Description of Artificial Sequence: targeting sequence/synthetic sequence
EIASNIQPQNVDSVCSGTLQ

SEQ ID NO: 11352 - protein, 20 aa, Artificial Sequence
  Description of Artificial Sequence: targeting sequence/synthetic sequence
NKGFNIENSGQNIERNPALQ

SEQ ID NO: 11353 - protein, 20 aa, Artificial Sequence
  Description of Artificial Sequence: targeting sequence/synthetic sequence
IKKLSLLEKQIENLRAADSA

SEQ ID NO: 11354 - protein, 20 aa, Artificial Sequence
  Description of Artificial Sequence: targeting sequence/synthetic sequence
EPLVPTGSENLKSLYNTTCV

SEQ ID NO: 11355 - protein, 20 aa, Artificial Sequence
  Description of Artificial Sequence: targeting sequence/synthetic sequence
QGLPGPKGQQGVTGLVGIPG

SEQ ID NO: 11356 - protein, 20 aa, Artificial Sequence
  Description of Artificial Sequence: targeting sequence/synthetic sequence
EPSQGTTTFAVTSILRVAAE

SEQ ID NO: 11357 - protein, 20 aa, Artificial Sequence
  Description of Artificial Sequence: targeting sequence/synthetic sequence
GRTILLSTHHMDEADLLGDR

SEQ ID NO: 11358 - protein, 20 aa, Artificial Sequence
  Description of Artificial Sequence: targeting sequence/synthetic sequence
HATTETIITMPTESDFLMQV

SEQ ID NO: 11359 - protein, 20 aa, Artificial Sequence
  Description of Artificial Sequence: targeting sequence/synthetic sequence
TGETTTTEYSNARYVSQQTR

SEQ ID NO: 11360 - protein, 20 aa, Artificial Sequence
  Description of Artificial Sequence: targeting sequence/synthetic sequence
VKKVDDKVTLYKTTATADSD

SEQ ID NO: 11361 - protein, 20 aa, Artificial Sequence
  Description of Artificial Sequence: targeting sequence/synthetic sequence
PTSGDCGLGTREGTRTGAEC

SEQ ID NO: 11362 - protein, 20 aa, Artificial Sequence
  Description of Artificial Sequence: targeting sequence/synthetic sequence
QTGNIMSRVTEDTSTLSDSL

SEQ ID NO: 11363 - protein, 20 aa, Artificial Sequence
  Description of Artificial Sequence: targeting sequence/synthetic sequence
KCLKNGAGDVAFVKHSTIFE

SEQ ID NO: 11364 - protein, 20 aa, Artificial Sequence
  Description of Artificial Sequence: targeting sequence/synthetic sequence
VPHGYAFSQEEHGAVSQEEV

SEQ ID NO: 11365 - protein, 20 aa, Artificial Sequence
  Description of Artificial Sequence: targeting sequence/synthetic sequence
RSGRTIIMSTHHMDEADLLG

SEQ ID NO: 11366 - protein, 20 aa, Artificial Sequence
  Description of Artificial Sequence: targeting sequence/synthetic sequence
GQVELGGGPGAGSLQPLALE

SEQ ID NO: 11367 - protein, 20 aa, Artificial Sequence
  Description of Artificial Sequence: targeting sequence/synthetic sequence
RTLTLVDTGIGMTKADLINN

SEQ ID NO: 11368 - protein, 20 aa, Artificial Sequence
  Description of Artificial Sequence: targeting sequence/synthetic sequence
WLKEKIIPAAKEKVEFLNNL

SEQ ID NO: 11369 - protein, 20 aa, Artificial Sequence
  Description of Artificial Sequence: targeting sequence/synthetic sequence
SQDKTLSLPELEQQQEQQQE

SEQ ID NO: 11370 - protein, 20 aa, Artificial Sequence
  Description of Artificial Sequence: targeting sequence/synthetic sequence
TALLSSGFSLEDPQTHSNRI

SEQ ID NO: 11371 - protein, 20 aa, Artificial Sequence
  Description of Artificial Sequence: targeting sequence/synthetic sequence
KDLATVYVDVLKDSGRDYVS

SEQ ID NO: 11372 - protein, 20 aa, Artificial Sequence
  Description of Artificial Sequence: targeting sequence/synthetic sequence
AGGLHAGKVIKGEEISVVPN

SEQ ID NO: 11373 - protein, 20 aa, Artificial Sequence
  Description of Artificial Sequence: targeting sequence/synthetic sequence
TMGARSVTLTVQARQLMSGI

SEQ ID NO: 11374 - protein, 20 aa, Artificial Sequence
  Description of Artificial Sequence: targeting sequence/synthetic sequence
VDKRSTTRDALDAGVDGIMT

SEQ ID NO: 11375 - protein, 20 aa, Artificial Sequence
  Description of Artificial Sequence: targeting sequence/synthetic sequence
QVNIGIHGSISAEAKACEEK

SEQ ID NO: 11376 - protein, 20 aa, Artificial Sequence
  Description of Artificial Sequence: targeting sequence/synthetic sequence
EHGIYTDVGEKGSQLAAGQK

SEQ ID NO: 11377 - protein, 20 aa, Artificial Sequence
  Description of Artificial Sequence: targeting sequence/synthetic sequence
IIREGRAVVLTSHSMEECEA

SEQ ID NO: 11378 - protein, 20 aa, Artificial Sequence
  Description of Artificial Sequence: targeting sequence/synthetic sequence
EDSLLHGQFSQAVTPLAHHH

SEQ ID NO: 11379 - protein, 20 aa, Artificial Sequence
  Description of Artificial Sequence: targeting sequence/synthetic sequence
SLPELEQQQEQQQEQQQEQV

SEQ ID NO: 11380 - protein, 20 aa, Artificial Sequence
  Description of Artificial Sequence: targeting sequence/synthetic sequence
ATTETIITMPTESDFLMQVD

SEQ ID NO: 11381 - protein, 20 aa, Artificial Sequence
  Description of Artificial Sequence: targeting sequence/synthetic sequence
MISRTPEVTCVVVDVSHEDP

SEQ ID NO: 11382 - protein, 20 aa, Artificial Sequence
  Description of Artificial Sequence: targeting sequence/synthetic sequence
FTNTKESSSHHPGIAEFPSR

SEQ ID NO: 11383 - protein, 20 aa, Artificial Sequence
  Description of Artificial Sequence: targeting sequence/synthetic sequence
DYHATTETIITMPTESDFLM

SEQ ID NO: 11384 - protein, 20 aa, Artificial Sequence
  Description of Artificial Sequence: targeting sequence/synthetic sequence
MGAAAVTLTVQARQLLPGIV

SEQ ID NO: 11385 - protein, 20 aa, Artificial Sequence
  Description of Artificial Sequence: targeting sequence/synthetic sequence
TSGYNAEVRVGDNVQLNTIY

SEQ ID NO: 11386 - protein, 20 aa, Artificial Sequence
  Description of Artificial Sequence: targeting sequence/synthetic sequence
DMQTREVLMKLSGTIECEGP

SEQ ID NO: 11387 - protein, 20 aa, Artificial Sequence
  Description of Artificial Sequence: targeting sequence/synthetic sequence
LRQKKPTISVKEVSFYTAAP

SEQ ID NO: 11388 - protein, 20 aa, Artificial Sequence
  Description of Artificial Sequence: targeting sequence/synthetic sequence
LDKGIMADPTVNVPLLGTVP

SEQ ID NO: 11389 - protein, 20 aa, Artificial Sequence
  Description of Artificial Sequence: targeting sequence/synthetic sequence
PGLKGLPGLPGIPGTPGEKG

SEQ ID NO: 11390 - protein, 20 aa, Artificial Sequence
  Description of Artificial Sequence: targeting sequence/synthetic sequence
TETNLQTAPKLSTSTSTTGT

SEQ ID NO: 11391 - protein, 20 aa, Artificial Sequence
  Description of Artificial Sequence: targeting sequence/synthetic sequence
RHALGGFTHRGSEPEEEEDV

SEQ ID NO: 11392 - protein, 20 aa, Artificial Sequence
  Description of Artificial Sequence: targeting sequence/synthetic sequence
QTTETNLQTAPKLSTSTSTT

SEQ ID NO: 11393 - protein, 20 aa, Artificial Sequence
  Description of Artificial Sequence: targeting sequence/synthetic sequence
GLVTGMADGVVASNHAGYEQ

SEQ ID NO: 11394 - protein, 20 aa, Artificial Sequence
  Description of Artificial Sequence: targeting sequence/synthetic sequence
LVTGMADGVVASNHAGYEQF

SEQ ID NO: 11395 - protein, 20 aa, Artificial Sequence
  Description of Artificial Sequence: targeting sequence/synthetic sequence
DEQMESMTYSTERKTNSLPL

SEQ ID NO: 11396 - protein, 20 aa, Artificial Sequence
  Description of Artificial Sequence: targeting sequence/synthetic sequence
EVGEIDADEEVKKALTGIKQ

SEQ ID NO: 11397 - protein, 20 aa, Artificial Sequence
  Description of Artificial Sequence: targeting sequence/synthetic sequence
LHMEEERKNNSNSSFDEEYL

SEQ ID NO: 11398 - protein, 20 aa, Artificial Sequence
  Description of Artificial Sequence: targeting sequence/synthetic sequence
IQTAVRLLLPGELAKHAVSE

SEQ ID NO: 11399 - protein, 20 aa, Artificial Sequence
  Description of Artificial Sequence: targeting sequence/synthetic sequence
GNIMSRVTEDTSTLSDSLSE

SEQ ID NO: 11400 - protein, 20 aa, Artificial Sequence
  Description of Artificial Sequence: targeting sequence/synthetic sequence
DLLGKEEDEGSHDENVSTCD

SEQ ID NO: 11401 - protein, 20 aa, Artificial Sequence
  Description of Artificial Sequence: targeting sequence/synthetic sequence
IKKADEQMESMTYSTERKTN

SEQ ID NO: 11402 - protein, 20 aa, Artificial Sequence
  Description of Artificial Sequence: targeting sequence/synthetic sequence
LFFLGFSVVFVGIVLGNLLI

SEQ ID NO: 11403 - protein, 20 aa, Artificial Sequence
  Description of Artificial Sequence: targeting sequence/synthetic sequence
GFLTTAGVAMGTASLTLSAQ

SEQ ID NO: 11404 - protein, 20 aa, Artificial Sequence
  Description of Artificial Sequence: targeting sequence/synthetic sequence
ESGIFTNTKESSSHHPGIAE

SEQ ID NO: 11405 - protein, 20 aa, Artificial Sequence
  Description of Artificial Sequence: targeting sequence/synthetic sequence
LDLLGKEEDEGSHDENVSTC

SEQ ID NO: 11406 - protein, 20 aa, Artificial Sequence
  Description of Artificial Sequence: targeting sequence/synthetic sequence
QTSEIITFAESGTARKTLHF

SEQ ID NO: 11407 - protein, 20 aa, Artificial Sequence
  Description of Artificial Sequence: targeting sequence/synthetic sequence
ELSRHWRRGTLSVDGETPVL

SEQ ID NO: 11408 - protein, 20 aa, Artificial Sequence
  Description of Artificial Sequence: targeting sequence/synthetic sequence
FTEACNAAKGLEWISNKISK

SEQ ID NO: 11409 - protein, 20 aa, Artificial Sequence
  Description of Artificial Sequence: targeting sequence/synthetic sequence
IMADPTVNVPLLGTVPHKAS

SEQ ID NO: 11410 - protein, 20 aa, Artificial Sequence
  Description of Artificial Sequence: targeting sequence/synthetic sequence
QVQLQESGPGLVKPSETLSL

SEQ ID NO: 11411 - protein, 20 aa, Artificial Sequence
  Description of Artificial Sequence: targeting sequence/synthetic sequence
ASGDLYTTSSQLTLPATQCP

SEQ ID NO: 11412 - protein, 20 aa, Artificial Sequence
  Description of Artificial Sequence: targeting sequence/synthetic sequence
TSREIQTAVRLLLPGELAKH

SEQ ID NO: 11413 - protein, 20 aa, Artificial Sequence
  Description of Artificial Sequence: targeting sequence/synthetic sequence
PSQGTTTFAVTSILRVAAED

SEQ ID NO: 11414 - protein, 20 aa, Artificial Sequence
  Description of Artificial Sequence: targeting sequence/synthetic sequence
TNKGFNIENSGQNIERNPAL

SEQ ID NO: 11415 - protein, 20 aa, Artificial Sequence
  Description of Artificial Sequence: targeting sequence/synthetic sequence
LRKKACDVLEIPYVIKQGDS

SEQ ID NO: 11416 - protein, 20 aa, Artificial Sequence
  Description of Artificial Sequence: targeting sequence/synthetic sequence
QLQESGPGLVKPSGTLSLTC

SEQ ID NO: 11417 - protein, 20 aa, Artificial Sequence
  Description of Artificial Sequence: targeting sequence/synthetic sequence
EKELKREPAVGEPAEVTTTV

SEQ ID NO: 11418 - protein, 20 aa, Artificial Sequence
  Description of Artificial Sequence: targeting sequence/synthetic sequence
LFGLLLLTSALAGQRQGTQA

SEQ ID NO: 11419 - protein, 20 aa, Artificial Sequence
  Description of Artificial Sequence: targeting sequence/synthetic sequence
FLAMAGSAMGATSLTLSAQS

SEQ ID NO: 11420 - protein, 20 aa, Artificial Sequence
  Description of Artificial Sequence: targeting sequence/synthetic sequence
QTREVLMKLSGTIECEGPNR

SEQ ID NO: 11421 - protein, 20 aa, Artificial Sequence
  Description of Artificial Sequence: targeting sequence/synthetic sequence
GCQQIMRQLQPSLQTGTEEI

SEQ ID NO: 11422 - protein, 20 aa, Artificial Sequence
  Description of Artificial Sequence: targeting sequence/synthetic sequence
HRSHRQMATATNPLIRHENR

SEQ ID NO: 11423 - protein, 20 aa, Artificial Sequence
  Description of Artificial Sequence: targeting sequence/synthetic sequence
LELSRHWRRGTLSVDGETPV

SEQ ID NO: 11424 - protein, 20 aa, Artificial Sequence
  Description of Artificial Sequence: targeting sequence/synthetic sequence
WLKKKACDLLEIPHVMRQGD

SEQ ID NO: 11425 - protein, 20 aa, Artificial Sequence
  Description of Artificial Sequence: targeting sequence/synthetic sequence
ITSREIQTAVRLLLPGELAK

SEQ ID NO: 11426 - protein, 20 aa, Artificial Sequence
  Description of Artificial Sequence: targeting sequence/synthetic sequence
QKRSLTTSPVDISIIDSVND

SEQ ID NO: 11427 - protein, 20 aa, Artificial Sequence
  Description of Artificial Sequence: targeting sequence/synthetic sequence
LPVNSPMNKGDTEVMKCIVE

SEQ ID NO: 11428 - protein, 20 aa, Artificial Sequence
  Description of Artificial Sequence: targeting sequence/synthetic sequence
SSASSQSHTFISSVESECHS

SEQ ID NO: 11429 - protein, 20 aa, Artificial Sequence
  Description of Artificial Sequence: targeting sequence/synthetic sequence
TSEIITFAESGTARKTLHFE

SEQ ID NO: 11430 - protein, 20 aa, Artificial Sequence
  Description of Artificial Sequence: targeting sequence/synthetic sequence
HALGGFTHRGSEPEEEEDVS

SEQ ID NO: 11431 - protein, 20 aa, Artificial Sequence
  Description of Artificial Sequence: targeting sequence/synthetic sequence
LFETALLSSGFSLEDPQTHS

SEQ ID NO: 11432 - protein, 20 aa, Artificial Sequence
  Description of Artificial Sequence: targeting sequence/synthetic sequence
ILLGLRQKKPTISVKEVSFY

SEQ ID NO: 11433 - protein, 20 aa, Artificial Sequence
  Description of Artificial Sequence: targeting sequence/synthetic sequence
SSSDAGLGSDHESDTLTIDV

SEQ ID NO: 11434 - protein, 20 aa, Artificial Sequence
  Description of Artificial Sequence: targeting sequence/synthetic sequence
PAPPSPQPATYTCVVSHEDS

SEQ ID NO: 11435 - protein, 20 aa, Artificial Sequence
  Description of Artificial Sequence: targeting sequence/synthetic sequence
AGRGASQPPTPTPASDAFQR

SEQ ID NO: 11436 - protein, 20 aa, Artificial Sequence
  Description of Artificial Sequence: targeting sequence/synthetic sequence
VAPPTPLTPTSHTANTSPRP

SEQ ID NO: 11437 - protein, 20 aa, Artificial Sequence
  Description of Artificial Sequence: targeting sequence/synthetic sequence
SEVGEIDADEEVKKALTGIK

SEQ ID NO: 11438 - protein, 20 aa, Artificial Sequence
  Description of Artificial Sequence: targeting sequence/synthetic sequence
ALGCCSDGKTPSLDAEGSNC

SEQ ID NO: 11439 - protein, 20 aa, Artificial Sequence
  Description of Artificial Sequence: targeting sequence/synthetic sequence
KLCSDIDECEMGVPVCPPAS

SEQ ID NO: 11440 - protein, 20 aa, Artificial Sequence
  Description of Artificial Sequence: targeting sequence/synthetic sequence
FLFLLFLLVYVTTIVGNLLI

SEQ ID NO: 11441 - protein, 20 aa, Artificial Sequence
  Description of Artificial Sequence: targeting sequence/synthetic sequence
SVSQSSSDAGLGSDHESDTL

SEQ ID NO: 11442 - protein, 20 aa, Artificial Sequence
  Description of Artificial Sequence: targeting sequence/synthetic sequence
GKLCSDIDECEMGVPVCPPA

SEQ ID NO: 11443 - protein, 20 aa, Artificial Sequence
  Description of Artificial Sequence: targeting sequence/synthetic sequence
EASGAGEARASTGSSDSSPG

SEQ ID NO: 11444 - protein, 20 aa, Artificial Sequence
  Description of Artificial Sequence: targeting sequence/synthetic sequence
LRVPAPPSPQPATYTCVVSH

SEQ ID NO: 11445 - protein, 20 aa, Artificial Sequence
  Description of Artificial Sequence: targeting sequence/synthetic sequence
LQTGSEELKSLYNAVVVLYY

SEQ ID NO: 11446 - DNA, 60 bp, Artificial Sequence
  Description of Artificial Sequence: targeting sequence/synthetic sequence
aggattggagtgggggcacccgtgtacatggccgccgtcctggaatacctgacagcggag

SEQ ID NO: 11447 - DNA, 60 bp, Artificial Sequence
  Description of Artificial Sequence: targeting sequence/synthetic sequence
ccttctcaccactgctccacagccacacccacctccagccacagacacgagagccacacg

SEQ ID NO: 11448 - DNA, 60 bp, Artificial Sequence
  Description of Artificial Sequence: targeting sequence/synthetic sequence
ggcgtggcccccaccaaggcccggagacgggtggtccagcgggagaagcgggccgtgggc

SEQ ID NO: 11449 - DNA, 60 bp, Artificial Sequence
  Description of Artificial Sequence: targeting sequence/synthetic sequence
cagctgaagcacatcgtgtgggccagccgggagctggagcggttcgccatcaaccccggc

SEQ ID NO: 11450 - DNA, 60 bp, Artificial Sequence
  Description of Artificial Sequence: targeting sequence/synthetic sequence
atcccagcctcatttggcaccagggccccacccatggtgcggaagatcgcggtgcgcagg

SEQ ID NO: 11451 - DNA, 60 bp, Artificial Sequence
  Description of Artificial Sequence: targeting sequence/synthetic sequence
aaggagatcagcctgagctacagcgccggcgccctggccagctgcatgggcctgatctac

SEQ ID NO: 11452 - DNA, 60 bp, Artificial Sequence
  Description of Artificial Sequence: targeting sequence/synthetic sequence
cgcatcgcgggcgaggcttcccgcctggcgcattacaacaagcgctcgaccatcacctcc

SEQ ID NO: 11453 - DNA, 60 bp, Artificial Sequence
  Description of Artificial Sequence: targeting sequence/synthetic sequence
gccggcgaggcttcccgcctggcgcattacaacaagcgctcgaccatcacctccagggag

SEQ ID NO: 11454 - DNA, 60 bp, Artificial Sequence
  Description of Artificial Sequence: targeting sequence/synthetic sequence
cgggtcggggcaggcgccccggtgtacctggcggcggtcctcgagtacctgaccgcggaa

SEQ ID NO: 11455 - DNA, 60 bp, Artificial Sequence
  Description of Artificial Sequence: targeting sequence/synthetic sequence
ggcgtggcccccaccaaggccaagcggagagtggtccagcgggagaagcgggccgtgggc

SEQ ID NO: 11456 - DNA, 60 bp, Artificial Sequence
  Description of Artificial Sequence: targeting sequence/synthetic sequence
cccctgggcgtggcccccaccaaggccaagcggagagtggtccagcgggagaagcgggcc

SEQ ID NO: 11457 - DNA, 60 bp, Artificial Sequence
  Description of Artificial Sequence: targeting sequence/synthetic sequence
gtgccctgcccagttccctcaactccacctaccccatctccctcaactccacctacccca

SEQ ID NO: 11458 - DNA, 60 bp, Artificial Sequence
  Description of Artificial Sequence: targeting sequence/synthetic sequence
atcgctggcgaggcttcccgcctggcgcattacaacaagcgctccaccatcacctccagg

SEQ ID NO: 11459 - DNA, 60 bp, Artificial Sequence
  Description of Artificial Sequence: targeting sequence/synthetic sequence
aaggaggtggccctgagctacagcgccggcgccctggccagctgcatgggcctgatctac

SEQ ID NO: 11460 - DNA, 60 bp, Artificial Sequence
  Description of Artificial Sequence: targeting sequence/synthetic sequence
aagctgaccgaggaccggtggaacaagccccagcaaaccaagggccaccggggcagccac

SEQ ID NO: 11461 - DNA, 60 bp, Artificial Sequence
  Description of Artificial Sequence: targeting sequence/synthetic sequence
caccactgctccacagccacacccacctccagccacagacacgagagccacacgtggagc

SEQ ID NO: 11462 - DNA, 60 bp, Artificial Sequence
  Description of Artificial Sequence: targeting sequence/synthetic sequence
gttccctcaactccacctaccccatctccctcaactccacctaccccatctccctcatgc

SEQ ID NO: 11463 - DNA, 60 bp, Artificial Sequence
  Description of Artificial Sequence: targeting sequence/synthetic sequence
ggcgcgccggtgtacctggcggcggtgttagagtacctgaccgccgagatcctggagctg

SEQ ID NO: 11464 - DNA, 60 bp, Artificial Sequence
  Description of Artificial Sequence: targeting sequence/synthetic sequence
ctgaagtccatcccagcctcatttggcaccagggccccacccatggtgcggaagatcgcg

SEQ ID NO: 11465 - DNA, 60 bp, Artificial Sequence
  Description of Artificial Sequence: targeting sequence/synthetic sequence
ctgaagcacctggtgtgggccagccgggagctggagaagttcaccctgaaccccggcctg

SEQ ID NO: 11466 - DNA, 60 bp, Artificial Sequence
  Description of Artificial Sequence: targeting sequence/synthetic sequence
gtgcagaagctggtggaggaccggtggaacaagccccagaagacccggggccaccggggc

SEQ ID NO: 11467 - DNA, 60 bp, Artificial Sequence
  Description of Artificial Sequence: targeting sequence/synthetic sequence
attcagacagcagtgcgcttgctactgccgggagagctggctaaacatgctgtgtctgag

SEQ ID NO: 11468 - DNA, 60 bp, Artificial Sequence
  Description of Artificial Sequence: targeting sequence/synthetic sequence
gcggtgatggcgctgcaggaggcttgcgaggcctacctggtggggctatttgaggatacc

SEQ ID NO: 11469 - DNA, 60 bp, Artificial Sequence
  Description of Artificial Sequence: targeting sequence/synthetic sequence
gccaaagcgaaatcccgctcttctcgcgctggtctccagttcccggtgggccgagtgcac

SEQ ID NO: 11470 - DNA, 60 bp, Artificial Sequence
  Description of Artificial Sequence: targeting sequence/synthetic sequence
aaggtgctgaagcaagtccaccccgacaccggcatctcctccaaagccatggggatcatg

SEQ ID NO: 11471 - DNA, 60 bp, Artificial Sequence
  Description of Artificial Sequence: targeting sequence/synthetic sequence
atctccgatttcttcgccaagcgcaagagatcagcgcctgagaagtcgtcgggcgatgtc

SEQ ID NO: 11472 - DNA, 60 bp, Artificial Sequence
  Description of Artificial Sequence: targeting sequence/synthetic sequence
tctgtcttccccctctctgtctcggactccccagcccggctgcagtctcttctcagggtc

SEQ ID NO: 11473 - DNA, 60 bp, Artificial Sequence
  Description of Artificial Sequence: targeting sequence/synthetic sequence
cccggcggaaagaaaaagtaccggctgaagcacatcgtgtgggccgctaacgagctgggc

SEQ ID NO: 11474 - DNA, 60 bp, Artificial Sequence
  Description of Artificial Sequence: targeting sequence/synthetic sequence
ggccgggggcggacctgctctcgcaccgtccgagcggagctttcgttttcagtgagccag

SEQ ID NO: 11475 - DNA, 60 bp, Artificial Sequence
  Description of Artificial Sequence: targeting sequence/synthetic sequence
acagtggctctccgcgagattcgccgctaccagaagtccaccgagctgctgatcagaaag

SEQ ID NO: 11476 - DNA, 60 bp, Artificial Sequence
  Description of Artificial Sequence: targeting sequence/synthetic sequence
tacagcgtgcccaagaccctgcaggcccggttcgtgaagcagatcgacttccggcccaag

SEQ ID NO: 11477 - DNA, 60 bp, Artificial Sequence
  Description of Artificial Sequence: targeting sequence/synthetic sequence
atctttgagcgcatcgctggcgaggcttcccgcctggcgcattacaacaagcgctcgacc

SEQ ID NO: 11478 - DNA, 60 bp, Artificial Sequence
  Description of Artificial Sequence: targeting sequence/synthetic sequence
gccaagactcgctcttctagggccggtctccagttccccgtgggccgagtgcaccgcctg

SEQ ID NO: 11479 - DNA, 60 bp, Artificial Sequence
  Description of Artificial Sequence: targeting sequence/synthetic sequence
ttcctgggcttcctggccaccgccggcagcgccatgggcgccgctagcctgaccgtgagc

SEQ ID NO: 11480 - DNA, 60 bp, Artificial Sequence
  Description of Artificial Sequence: targeting sequence/synthetic sequence
gagtctgggggaggcttggtacagcctggggggtccctgagactctcctgtgtagcctct

SEQ ID NO: 11481 - DNA, 60 bp, Artificial Sequence
  Description of Artificial Sequence: targeting sequence/synthetic sequence
accgatcttcgcttccagagctctgcggtgatggcgctgcaggaggcttgtgaggcctac

SEQ ID NO: 11482 - DNA, 60 bp, Artificial Sequence
  Description of Artificial Sequence: targeting sequence/synthetic sequence
agcaagaaaaagtaccggctgaagcacctggtgtgggccagccgggagctggagcggttc

SEQ ID NO: 11483 - DNA, 60 bp, Artificial Sequence
  Description of Artificial Sequence: targeting sequence/synthetic sequence
atgggcgccgtgagcgtggccctgaccggccaggcccggcagctgctcagcggcatcgtg

SEQ ID NO: 11484 - DNA, 60 bp, Artificial Sequence
  Description of Artificial Sequence: targeting sequence/synthetic sequence
ctgcagctagcgatccgcaatgatgaggaactcaataagcttttgggcggcgtgaccatt

SEQ ID NO: 11485 - DNA, 60 bp, Artificial Sequence
  Description of Artificial Sequence: targeting sequence/synthetic sequence
gagaagcgggccgtgggcatcgtgggcgccatgttcctgggcttcctgggcgccgctggc

SEQ ID NO: 11486 - DNA, 60 bp, Artificial Sequence
  Description of Artificial Sequence: targeting sequence/synthetic sequence
cgagtcggggccggcgcgccagtgtatctggcggcggtgttggagtacctgaccgccgag

SEQ ID NO: 11487 - DNA, 60 bp, Artificial Sequence
  Description of Artificial Sequence: targeting sequence/synthetic sequence
tatctcttcctcttgttgcttctcatttacctcatgactgtgttgggaaacctgctgata

SEQ ID NO: 11488 - DNA, 60 bp, Artificial Sequence
  Description of Artificial Sequence: targeting sequence/synthetic sequence
accatgggcgccgctgccgtgaccctgaccgtgcaggcccggcagctgctccccggcatc

SEQ ID NO: 11489 - DNA, 60 bp, Artificial Sequence
  Description of Artificial Sequence: targeting sequence/synthetic sequence
aaggcggcctctggggaagccaagcctaaggctaaaaaggcaggcgcggccaaggccaag

SEQ ID NO: 11490 - DNA, 60 bp, Artificial Sequence
  Description of Artificial Sequence: targeting sequence/synthetic sequence
gacatcttcgagcgcatcgcgggagaggcttcccgcctggcgcactacaacaagcgctcc

SEQ ID NO: 11491 - DNA, 60 bp, Artificial Sequence
  Description of Artificial Sequence: targeting sequence/synthetic sequence
gtcttccccctctctgtctcggactccccagcccggctgcagtctcttctcagggtcctg

SEQ ID NO: 11492 - DNA, 60 bp, Artificial Sequence
  Description of Artificial Sequence: targeting sequence/synthetic sequence
atgaacgagtacagcgtgcccaagaccctgcaggcccggttcgtgaagcagatcgacttc

SEQ ID NO: 11493 - DNA, 60 bp, Artificial Sequence
  Description of Artificial Sequence: targeting sequence/synthetic sequence
cccctgttctgggtggtgcttctggtctacctggtcaccttgctgggtaactccctgatc

SEQ ID NO: 11494 - DNA, 60 bp, Artificial Sequence
  Description of Artificial Sequence: targeting sequence/synthetic sequence
gacagtgggaaggccaaggctaaggcagtatctcgctcacagagagctgggctacagttt

SEQ ID NO: 11495 - DNA, 60 bp, Artificial Sequence
  Description of Artificial Sequence: targeting sequence/synthetic sequence
aagctggccctgaacaagctgagcctgaacctctacgagaaccaggtggtctccttcttg

SEQ ID NO: 11496 - DNA, 60 bp, Artificial Sequence
  Description of Artificial Sequence: targeting sequence/synthetic sequence
ttccagagctccgctgtgatggctctgcaggaggcgtgcgaggcctacttggtagggcta

SEQ ID NO: 11497 - DNA, 60 bp, Artificial Sequence
  Description of Artificial Sequence: targeting sequence/synthetic sequence
ttccgctctgtcttccccctctctgtctcggactccccagcccggctgcagtctcttctc

SEQ ID NO: 11498 - DNA, 60 bp, Artificial Sequence
  Description of Artificial Sequence: targeting sequence/synthetic sequence
agctctgcggtgatggcgctgcaggaggcttgtgaggcctacctggtgggactcttcgaa

SEQ ID NO: 11499 - DNA, 60 bp, Artificial Sequence
  Description of Artificial Sequence: targeting sequence/synthetic sequence
agcaccatgggcgccgctagcatcaccctgaccgcccaggtgcggcagctgctcagcggc

SEQ ID NO: 11500 - DNA, 60 bp, Artificial Sequence
  Description of Artificial Sequence: targeting sequence/synthetic sequence
acggccgtgcgcctgctgctgccaggggagctggccaagcacgcggtgtcggagggcacc

SEQ ID NO: 11501 - DNA, 60 bp, Artificial Sequence
  Description of Artificial Sequence: targeting sequence/synthetic sequence
ggcaaagcccgcgctaaggccaagactcgctcttctagggccggtctccagttccccgtg

SEQ ID NO: 11502 - DNA, 60 bp, Artificial Sequence
  Description of Artificial Sequence: targeting sequence/synthetic sequence
ttcgccaagcgcaagagatcagcgcctgagaagtcgtcgggcgatgtccccgcgccgtgt

SEQ ID NO: 11503 - DNA, 60 bp, Artificial Sequence
  Description of Artificial Sequence: targeting sequence/synthetic sequence
cactacaacaagcgctcgaccatcacctccagggagatccagaccgccgtgcgcctgctg

SEQ ID NO: 11504 - DNA, 60 bp, Artificial Sequence
  Description of Artificial Sequence: targeting sequence/synthetic sequence
gccgtgttctttggcttcctgggcgccgctggcagcaccatgggcgccgctagcatcacc

SEQ ID NO: 11505 - DNA, 60 bp, Artificial Sequence
  Description of Artificial Sequence: targeting sequence/synthetic sequence
gccatcgcccgggtggccgacaccatgcccagcggccccaccaacagcgaggccgtgccc

SEQ ID NO: 11506 - DNA, 60 bp, Artificial Sequence
  Description of Artificial Sequence: targeting sequence/synthetic sequence
gtggctctgcgcgagatccgccgctaccagaagtcgaccgagctgctgattcgcaaactg

SEQ ID NO: 11507 - DNA, 60 bp, Artificial Sequence
  Description of Artificial Sequence: targeting sequence/synthetic sequence
ctcctctttgtccttttttttgcaatttaccttctgacattgttggagaatgcacttatt

SEQ ID NO: 11508 - DNA, 60 bp, Artificial Sequence
  Description of Artificial Sequence: targeting sequence/synthetic sequence
aagcggggcgtgctggtgctgggcttcctgggcttcctgaccacagccggcgccgctatg

SEQ ID NO: 11509 - DNA, 60 bp, Artificial Sequence
  Description of Artificial Sequence: targeting sequence/synthetic sequence
ggcgcgccagtgtacctggcggcagtgctggagtacctcaccgctgagatcctggagctg

SEQ ID NO: 11510 - DNA, 60 bp, Artificial Sequence
  Description of Artificial Sequence: targeting sequence/synthetic sequence
cacaagcggggcgtgctggtgctgggcttcctgggcttcctgaccacagccggcgccgct

SEQ ID NO: 11511 - DNA, 60 bp, Artificial Sequence
  Description of Artificial Sequence: targeting sequence/synthetic sequence
cagaagaagcggcgaaaactgggcgccgaagaggcggcgagggccgtggacgacggaggc

SEQ ID NO: 11512 - DNA, 60 bp, Artificial Sequence
  Description of Artificial Sequence: targeting sequence/synthetic sequence
cgcccgggcaccgtggccttgcgcgaaatccgtcgctaccagaagtccaccgagctgctg

SEQ ID NO: 11513 - DNA, 60 bp, Artificial Sequence
  Description of Artificial Sequence: targeting sequence/synthetic sequence
gtgtacctggctgcggtgctggagtacctgaccgctgagatcctggagctggctggcaat

SEQ ID NO: 11514 - DNA, 60 bp, Artificial Sequence
  Description of Artificial Sequence: targeting sequence/synthetic sequence
caacagcttcagaagaagcggcgaaaactgggcgccgaagaggcggcgagggccgtggac

SEQ ID NO: 11515 - DNA, 60 bp, Artificial Sequence
  Description of Artificial Sequence: targeting sequence/synthetic sequence
ggtgttctgaaggtgttcctggagaacgtgattcgtgacgctgtcacttacacagagcac

SEQ ID NO: 11516 - DNA, 60 bp, Artificial Sequence
  Description of Artificial Sequence: targeting sequence/synthetic sequence
tacaacaagcgctccaccatcacatcccgtgagatccagacggccgtgcgcctgctgctg

SEQ ID NO: 11517 - DNA, 60 bp, Artificial Sequence
  Description of Artificial Sequence: targeting sequence/synthetic sequence
gccagcaccgaccagctgaagagcgtgggcctgaacctggagggcagcggcgtgagcacc

SEQ ID NO: 11518 - DNA, 60 bp, Artificial Sequence
  Description of Artificial Sequence: targeting sequence/synthetic sequence
ggcaagggtgatgctggtgcccctggtgaacgtggacctcctggattggcaggggcccca

SEQ ID NO: 11519 - DNA, 60 bp, Artificial Sequence
  Description of Artificial Sequence: targeting sequence/synthetic sequence
accgtgcagcgggagaagcgggccgtgggcatcggcgccgtgttcctgggcttcctgggc

SEQ ID NO: 11520 - DNA, 60 bp, Artificial Sequence
  Description of Artificial Sequence: targeting sequence/synthetic sequence
gcgatccgcaatgatgaggaactcaataagcttttgggcggcgtgaccattgcccagggc

SEQ ID NO: 11521 - DNA, 60 bp, Artificial Sequence
  Description of Artificial Sequence: targeting sequence/synthetic sequence
gagtctgggggaggcgtggtccagcccgggagctccctgagactctcctgtgcagcctct

SEQ ID NO: 11522 - DNA, 60 bp, Artificial Sequence
  Description of Artificial Sequence: targeting sequence/synthetic sequence
caaggtccctctggagcaagtggtgaacgtggtccccctggtcccatgggcccccctgga

SEQ ID NO: 11523 - DNA, 60 bp, Artificial Sequence
  Description of Artificial Sequence: targeting sequence/synthetic sequence
ggcggccgggggcggacctgctctcgcaccgtccgagcggagctttcgttttcagtgagc

SEQ ID NO: 11524 - DNA, 60 bp, Artificial Sequence
  Description of Artificial Sequence: targeting sequence/synthetic sequence
gtggaggaacacctctggttctactcacggctcaagagcatggctcaggaggagatccgc

SEQ ID NO: 11525 - DNA, 60 bp, Artificial Sequence
  Description of Artificial Sequence: targeting sequence/synthetic sequence
aaggtgttcctggagaacgtgattcgtgacgctgtcacttacacagagcacgccaaacgc

SEQ ID NO: 11526 - DNA, 60 bp, Artificial Sequence
  Description of Artificial Sequence: targeting sequence/synthetic sequence
gacaagaagctggccctgaacaagctgagcctgaacctctacgagaaccaggtggtctcc

SEQ ID NO: 11527 - DNA, 60 bp, Artificial Sequence
  Description of Artificial Sequence: targeting sequence/synthetic sequence
ggcagcaccatgggcgccgctagcgtgaccctgaccgtgcaggcccggctgctcctgagc

SEQ ID NO: 11528 - DNA, 60 bp, Artificial Sequence
  Description of Artificial Sequence: targeting sequence/synthetic sequence
agcaccatgggcgccagcatgaccctgaccgtgcaggcccggctgctcctgagcggcatc

SEQ ID NO: 11529 - DNA, 60 bp, Artificial Sequence
  Description of Artificial Sequence: targeting sequence/synthetic sequence
aagctgagctccaccagccagctgaagagcgtgggcctgaacctggagggcaacggcgtg

SEQ ID NO: 11530 - DNA, 60 bp, Artificial Sequence
  Description of Artificial Sequence: targeting sequence/synthetic sequence
tacaggcctgggaccgtggcgcttcgagagattcgtcgttatcagaagtcgaccgagctg

SEQ ID NO: 11531 - DNA, 60 bp, Artificial Sequence
  Description of Artificial Sequence: targeting sequence/synthetic sequence
gcttccggggaaggcaaacccaaggccaaaaaggctggcgcagccaagcctaggaagcct

SEQ ID NO: 11532 - DNA, 60 bp, Artificial Sequence
  Description of Artificial Sequence: targeting sequence/synthetic sequence
tacaaggttctgaagcaggtccaccccgacaccggcatctcatccaaggccatggggatc

SEQ ID NO: 11533 - DNA, 60 bp, Artificial Sequence
  Description of Artificial Sequence: targeting sequence/synthetic sequence
actggcccctatggcgcccctgctgggccactgattgtgccttataacctgcctttgcct

SEQ ID NO: 11534 - DNA, 60 bp, Artificial Sequence
  Description of Artificial Sequence: targeting sequence/synthetic sequence
ccctatggcgcccctgctgggccactgattgtgccttataacctgcctttgcctggggga

SEQ ID NO: 11535 - DNA, 60 bp, Artificial Sequence
  Description of Artificial Sequence: targeting sequence/synthetic sequence
cacctctggttctactcacggctcaagagcatggctcaggaggagatccgcagagagatg

SEQ ID NO: 11536 - DNA, 60 bp, Artificial Sequence
  Description of Artificial Sequence: targeting sequence/synthetic sequence
gcagtgctggagtacctcaccgctgagatcctggagctggcgggcaatgcggcccgcgac

SEQ ID NO: 11537 - DNA, 60 bp, Artificial Sequence
  Description of Artificial Sequence: targeting sequence/synthetic sequence
aagctgaccgaggaccggtggaacaagccccagaagaccaagggccacaagggcagccac

SEQ ID NO: 11538 - DNA, 60 bp, Artificial Sequence
  Description of Artificial Sequence: targeting sequence/synthetic sequence
atacaagtcagcagacgacgaagccttggagtacgaagacccttgcaagagcacgtccgc

SEQ ID NO: 11539 - DNA, 60 bp, Artificial Sequence
  Description of Artificial Sequence: targeting sequence/synthetic sequence
cgtaagtccactggcggcaaagccccgcgcaagcagctggccactaaggcggctcgcaaa

SEQ ID NO: 11540 - DNA, 60 bp, Artificial Sequence
  Description of Artificial Sequence: targeting sequence/synthetic sequence
ccaaagagccgggagctgagggtcaaccggggcctggacaccgggcgcaggagggcagca

SEQ ID NO: 11541 - DNA, 60 bp, Artificial Sequence
  Description of Artificial Sequence: targeting sequence/synthetic sequence
gagattcagacggctgtgcgcctgctgctgcctggggagctggctaagcatgctgtgtcc

SEQ ID NO: 11542 - DNA, 60 bp, Artificial Sequence
  Description of Artificial Sequence: targeting sequence/synthetic sequence
cgcctgctgctgcccggcgagctggccaagcacgccgtgtccgagggcaccaaggctgtc

SEQ ID NO: 11543 - DNA, 60 bp, Artificial Sequence
  Description of Artificial Sequence: targeting sequence/synthetic sequence
accaagctgaccgaggaccggtggaacgagcggcagaagacccagggccaccggggcaac

SEQ ID NO: 11544 - DNA, 60 bp, Artificial Sequence
  Description of Artificial Sequence: targeting sequence/synthetic sequence
gtgatcaagcagggcgacagctggctgaagaaattcaccgaggcctgcaacgccgctaag

SEQ ID NO: 11545 - DNA, 60 bp, Artificial Sequence
  Description of Artificial Sequence: targeting sequence/synthetic sequence
caagtcagcagacgacgaagccttggagtacgaagacccttgcaagagcacgtccgcttt

SEQ ID NO: 11546 - DNA, 60 bp, Artificial Sequence
  Description of Artificial Sequence: targeting sequence/synthetic sequence
ggcagcaccatgggcgccgctgccatcaccctgaccgcccaggcccggcagctgctcagc

SEQ ID NO: 11547 - DNA, 60 bp, Artificial Sequence
  Description of Artificial Sequence: targeting sequence/synthetic sequence
agcgaccggggctggggcaacggctgcggcctgttcggcaagggcagcatggagacctgc

SEQ ID NO: 11548 - DNA, 60 bp, Artificial Sequence
  Description of Artificial Sequence: targeting sequence/synthetic sequence
ggtctgttcgaagataccaacctgtgtgccatccacgctaagagagtcaccatcatgccc

SEQ ID NO: 11549 - DNA, 60 bp, Artificial Sequence
  Description of Artificial Sequence: targeting sequence/synthetic sequence
tggggcaacggctgcggcctgttcggcaagggcagcatggagacctgcgccaagttcagc

SEQ ID NO: 11550 - DNA, 60 bp, Artificial Sequence
  Description of Artificial Sequence: targeting sequence/synthetic sequence
ctgcccgaggaacaccaggccagcaccgtgtgccggagagaccagagcgaccggggctgg

SEQ ID NO: 11551 - DNA, 60 bp, Artificial Sequence
  Description of Artificial Sequence: targeting sequence/synthetic sequence
cccgccaccctgcccgaggaacaccaggccagcaccgtgtgccggagagaccagagcgac

SEQ ID NO: 11552 - DNA, 60 bp, Artificial Sequence
  Description of Artificial Sequence: targeting sequence/synthetic sequence
ttcaagaccgacttgcgcttccagagctccgcggtgatggcgctgcaagaggcatgcgag

SEQ ID NO: 11553 - DNA, 60 bp, Artificial Sequence
  Description of Artificial Sequence: targeting sequence/synthetic sequence
aagaccgacctgcgcttccagagctcggctgtgatggcgctgcaggaggcctgcgaggct

SEQ ID NO: 11554 - DNA, 60 bp, Artificial Sequence
  Description of Artificial Sequence: targeting sequence/synthetic sequence
ggccgcgtgcaccggttgctccgcaagggcaactattcggagcgcgtgggcgccggcgcc

SEQ ID NO: 11555 - DNA, 60 bp, Artificial Sequence
  Description of Artificial Sequence: targeting sequence/synthetic sequence
cgagtgcaccgcctgctccgcaagggtaattatgccgagcgggttggagccggcgcgcca

SEQ ID NO: 11556 - DNA, 60 bp, Artificial Sequence
  Description of Artificial Sequence: targeting sequence/synthetic sequence
aggaagcagctggccaccaaggcggcccgcaagagcgcgccggccacgggcggggtgaag

SEQ ID NO: 11557 - DNA, 60 bp, Artificial Sequence
  Description of Artificial Sequence: targeting sequence/synthetic sequence
aagcagagcgccagctggctgaagaaattcaacgacatggccaacgccgctaagggcctg

SEQ ID NO: 11558 - DNA, 60 bp, Artificial Sequence
  Description of Artificial Sequence: targeting sequence/synthetic sequence
cgggagctgagggtcaaccggggcctggacaccgggcgcaggagggcagcaccagaggcc

SEQ ID NO: 11559 - DNA, 60 bp, Artificial Sequence
  Description of Artificial Sequence: targeting sequence/synthetic sequence
atgcggcagggcgacagctggctgaagaaattcaccgaggcctgcaacgccgctaagggc

SEQ ID NO: 11560 - DNA, 60 bp, Artificial Sequence
  Description of Artificial Sequence: targeting sequence/synthetic sequence
aaacagttggccactaaggcagcccgcaaaagcgctccggccaccggcggcgtgaaaaag

SEQ ID NO: 11561 - DNA, 60 bp, Artificial Sequence
  Description of Artificial Sequence: targeting sequence/synthetic sequence
cggcccggcggaaagaaaaagtacaagctgaagcacatcgtgtgggccagccgggagctg

SEQ ID NO: 11562 - DNA, 60 bp, Artificial Sequence
  Description of Artificial Sequence: targeting sequence/synthetic sequence
cggcccggcggaaagaaaaagtaccggctgaagcacatcgtgtgggccgctaacgagctg

SEQ ID NO: 11563 - DNA, 60 bp, Artificial Sequence
  Description of Artificial Sequence: targeting sequence/synthetic sequence
gtgcaccccgacaccggcatctcgtccaaggccatgggcatcatgaactccttcgtcaat

SEQ ID NO: 11564 - DNA, 60 bp, Artificial Sequence
  Description of Artificial Sequence: targeting sequence/synthetic sequence
ctggcggcggtgttggagtaccttacggcggagatcctggagctggctggcaacgccgcg

SEQ ID NO: 11565 - DNA, 60 bp, Artificial Sequence
  Description of Artificial Sequence: targeting sequence/synthetic sequence
ctgccaggggagctggccaagcacgcggtgtcggagggcaccaaggccgtcaccaagtac

SEQ ID NO: 11566 - DNA, 60 bp, Artificial Sequence
  Description of Artificial Sequence: targeting sequence/synthetic sequence
cgcaagtccaccggcggcaaagcgccgcgcaagcagctggccaccaaggcggctcgcaag

SEQ ID NO: 11567 - DNA, 60 bp, Artificial Sequence
  Description of Artificial Sequence: targeting sequence/synthetic sequence
gtgggcatcattgctggcctggttctccttggatctgtggtctctggagctgtggttgct

SEQ ID NO: 11568 - DNA, 60 bp, Artificial Sequence
  Description of Artificial Sequence: targeting sequence/synthetic sequence
attgctggcctggttctccttggagctgtgatcactggagctgtggtcgctgccgtgatg

SEQ ID NO: 11569 - DNA, 60 bp, Artificial Sequence
  Description of Artificial Sequence: targeting sequence/synthetic sequence
atccagacggccgtgcgcctactgctacccggggaattggccaagcacgccgtgtccgag

SEQ ID NO: 11570 - DNA, 60 bp, Artificial Sequence
  Description of Artificial Sequence: targeting sequence/synthetic sequence
cggcccggcggaaagaaaaagtaccggctgaagcacatcgtgtgggccgctaacaagctg

SEQ ID NO: 11571 - DNA, 60 bp, Artificial Sequence
  Description of Artificial Sequence: targeting sequence/synthetic sequence
atcgccagcatccacgacagcaaccccacccaggagaagcgggagcagctgttcaacaat

SEQ ID NO: 11572 - DNA, 60 bp, Artificial Sequence
  Description of Artificial Sequence: targeting sequence/synthetic sequence
ggcatggagtggatcgccgtgaagatccagaagttcatcgactggctgaaggtgaagatc

SEQ ID NO: 11573 - DNA, 60 bp, Artificial Sequence
  Description of Artificial Sequence: targeting sequence/synthetic sequence
aagaaggccgtgaccaaggcgcagaagaaggacggcaagaagcgcaagcgcagccgcaag

SEQ ID NO: 11574 - DNA, 60 bp, Artificial Sequence
  Description of Artificial Sequence: targeting sequence/synthetic sequence
ttcggcttcctgggcgccgctggcagcaccatgggcgccgctagcatcaccctgaccgtg

SEQ ID NO: 11575 - DNA, 60 bp, Artificial Sequence
  Description of Artificial Sequence: targeting sequence/synthetic sequence
cgtattacccctcgtcacttgcaacttgctattcgtggagatgaagaattggattctctc

SEQ ID NO: 11576 - DNA, 60 bp, Artificial Sequence
  Description of Artificial Sequence: targeting sequence/synthetic sequence
agggtcaacctggtacagacagaggagcaatatgtgtttgtgcacgatgccatcctggaa

SEQ ID NO: 11577 - DNA, 60 bp, Artificial Sequence
  Description of Artificial Sequence: targeting sequence/synthetic sequence
aatctcaccacaggtgccacgctgatcaatgaacaatggctgctgaccacggctaaaaat

SEQ ID NO: 11578 - DNA, 60 bp, Artificial Sequence
  Description of Artificial Sequence: targeting sequence/synthetic sequence
gtgggctacaccgagatcgacggcaagcacttctacttcgccgagaacggcgagatgcag

SEQ ID NO: 11579 - DNA, 60 bp, Artificial Sequence
  Description of Artificial Sequence: targeting sequence/synthetic sequence
atcaccttccacggcgccaaggagatcgccctgggctacagcgccggcgccctggccagc

SEQ ID NO: 11580 - DNA, 60 bp, Artificial Sequence
  Description of Artificial Sequence: targeting sequence/synthetic sequence
aaagtggggagccgggaggctgcgttcacctacgccatcattgccgccggcgtggcccac

SEQ ID NO: 11581 - DNA, 60 bp, Artificial Sequence
  Description of Artificial Sequence: targeting sequence/synthetic sequence
gagagctccaagcgggacaagagcaagaaaaagaaaaaggtgaaggtgaagatggagaag

SEQ ID NO: 11582 - DNA, 60 bp, Artificial Sequence
  Description of Artificial Sequence: targeting sequence/synthetic sequence
gcgtccgtggtcactgaactgcgctgccagtgcttgcagacactgcagggaattcacctc

SEQ ID NO: 11583 - DNA, 60 bp, Artificial Sequence
  Description of Artificial Sequence: targeting sequence/synthetic sequence
ccattccagcgtctagtccgtgagatcgcgcaggacttcaagactgatctgcgttttcag

SEQ ID NO: 11584 - DNA, 60 bp, Artificial Sequence
  Description of Artificial Sequence: targeting sequence/synthetic sequence
cattccattattagacgttccctgccagcaacactaccacagtgtcaggcagcgaacaag

SEQ ID NO: 11585 - DNA, 60 bp, Artificial Sequence
  Description of Artificial Sequence: targeting sequence/synthetic sequence
ggtgccacgctgatcaatgaacaatggctgctgaccacggctaaaaatctcttcctgaac

SEQ ID NO: 11586 - DNA, 60 bp, Artificial Sequence
  Description of Artificial Sequence: targeting sequence/synthetic sequence
gacaagttccggatcttctgcaaggccctgaaccccaaggagatcgagaagctgtacacc

SEQ ID NO: 11587 - DNA, 60 bp, Artificial Sequence
  Description of Artificial Sequence: targeting sequence/synthetic sequence
ttcctgggcttcctgggcgccgctggcagcaccatgggcgccggcagcctgaccctgacc

SEQ ID NO: 11588 - DNA, 60 bp, Artificial Sequence
  Description of Artificial Sequence: targeting sequence/synthetic sequence
ggctccaagaaggcagtgacaaaggcccagaagaaggacggcaagaagcgcaagcgcagc

SEQ ID NO: 11589 - DNA, 60 bp, Artificial Sequence
  Description of Artificial Sequence: targeting sequence/synthetic sequence
gtaaagcgtattacccctcgtcacttgcaacttgctattcgtggagatgaagaattggat

SEQ ID NO: 11590 - DNA, 60 bp, Artificial Sequence
  Description of Artificial Sequence: targeting sequence/synthetic sequence
gcgacgggggcggccacccccaagaagagcgccaagaagaccccaaagaaggcgaagaag

SEQ ID NO: 11591 - DNA, 60 bp, Artificial Sequence
  Description of Artificial Sequence: targeting sequence/synthetic sequence
gccatccgcaacgacgaggagctcaacaagctgctgggcaaagtcaccatcgcgcagggt

SEQ ID NO: 11592 - DNA, 60 bp, Artificial Sequence
  Description of Artificial Sequence: targeting sequence/synthetic sequence
aagatgtccacgcctgttgaagttttatgtaaggggtttcctgcagaatttgcgatgtac

SEQ ID NO: 11593 - DNA, 60 bp, Artificial Sequence
  Description of Artificial Sequence: targeting sequence/synthetic sequence
aagcgggagatcaccttccacggcgccaaggagatcgccctgagctacagcgccggcgcc

SEQ ID NO: 11594 - DNA, 60 bp, Artificial Sequence
  Description of Artificial Sequence: targeting sequence/synthetic sequence
aacaagaagacgcgcatcatccctcgtcacctccagctggccatccgcaacgacgaggaa

SEQ ID NO: 11595 - DNA, 60 bp, Artificial Sequence
  Description of Artificial Sequence: targeting sequence/synthetic sequence
tacggcatcgacgtgaccatccggaacgcctacgacaagaccgccctggacatcgccatc

SEQ ID NO: 11596 - DNA, 60 bp, Artificial Sequence
  Description of Artificial Sequence: targeting sequence/synthetic sequence
gccaagggcctggagtggatcttcaacaagatcagcaagttcatcgactggctgaaggag

SEQ ID NO: 11597 - DNA, 60 bp, Artificial Sequence
  Description of Artificial Sequence: targeting sequence/synthetic sequence
cagaagaaggatggcaagaagcgcaagcgcagccgcaaggagagctattccgtgtacgtg

SEQ ID NO: 11598 - DNA, 60 bp, Artificial Sequence
  Description of Artificial Sequence: targeting sequence/synthetic sequence
gctggcaacgcggcccgcgacaacaagaagactcgcatcatcccgcgtcacctccagctg

SEQ ID NO: 11599 - DNA, 60 bp, Artificial Sequence
  Description of Artificial Sequence: targeting sequence/synthetic sequence
gtggacatcctctactaccgcaaggatgcctccagcttccgctgcctggtagatgtggtg

SEQ ID NO: 11600 - DNA, 60 bp, Artificial Sequence
  Description of Artificial Sequence: targeting sequence/synthetic sequence
gccaagaaacccgccggcgccacccccaagaaagccaagaaagccgctggcgccaagaaa

SEQ ID NO: 11601 - DNA, 60 bp, Artificial Sequence
  Description of Artificial Sequence: targeting sequence/synthetic sequence
ggaaggaaggcaaaggaggacagtggcaacaaacccatgtcaaaaaaagaaatgattgcc

SEQ ID NO: 11602 - DNA, 60 bp, Artificial Sequence
  Description of Artificial Sequence: targeting sequence/synthetic sequence
gtgaccaaggcgcagaagaaggacggcaagaagcgcaagcgcagccgcaaggagagctac

SEQ ID NO: 11603 - DNA, 60 bp, Artificial Sequence
  Description of Artificial Sequence: targeting sequence/synthetic sequence
gaattggccggcaatgccgcgagggacaacaagaaggcccggatagccccgagacacatc

SEQ ID NO: 11604 - DNA, 60 bp, Artificial Sequence
  Description of Artificial Sequence: targeting sequence/synthetic sequence
ggtgagactggccctgctggacgtcctggtgaagttggtccccctggtccccctggccct

SEQ ID NO: 11605 - DNA, 60 bp, Artificial Sequence
  Description of Artificial Sequence: targeting sequence/synthetic sequence
ggggcagggggctacccaggggcttcctatcctggggcctaccccgggcaggcaccccca

SEQ ID NO: 11606 - DNA, 60 bp, Artificial Sequence
  Description of Artificial Sequence: targeting sequence/synthetic sequence
agctgcaagggcatggagtggatcagcatcaagatccagaagttcatcgagtggctgaag

SEQ ID NO: 11607 - DNA, 60 bp, Artificial Sequence
  Description of Artificial Sequence: targeting sequence/synthetic sequence
cccggaagtcaaggagaaagtggtcgaccaggtcctcctgggccatctggtccccgaggt

SEQ ID NO: 11608 - DNA, 60 bp, Artificial Sequence
  Description of Artificial Sequence: targeting sequence/synthetic sequence
ggccggggcgagagctccaagcgggacaagagcaagaaaaagaaaaaggtgaaggtgaag

SEQ ID NO: 11609 - DNA, 60 bp, Artificial Sequence
  Description of Artificial Sequence: targeting sequence/synthetic sequence
cctggcaaagatggcgtccgtggtctgaccggccccattggtcctcctggccctgctggt

SEQ ID NO: 11610 - DNA, 60 bp, Artificial Sequence
  Description of Artificial Sequence: targeting sequence/synthetic sequence
aaacctcgaaatgtgcctgcagcatatcgtggtgtgggggatgaccagctgggggaggag

SEQ ID NO: 11611 - DNA, 60 bp, Artificial Sequence
  Description of Artificial Sequence: targeting sequence/synthetic sequence
gacgattgggccctggagatcgcccagcggaaccgggccatcaaccccttcgtggagtac

SEQ ID NO: 11612 - DNA, 60 bp, Artificial Sequence
  Description of Artificial Sequence: targeting sequence/synthetic sequence
gcgcccctggccactgaactgcgctgccagtgcttgcagaccctgcagggaattcacctc

SEQ ID NO: 11613 - DNA, 60 bp, Artificial Sequence
  Description of Artificial Sequence: targeting sequence/synthetic sequence
aacgaggactgtgagctcaggatcctggatttcgggctggcgcgccaggcggacgaggag

SEQ ID NO: 11614 - DNA, 60 bp, Artificial Sequence
  Description of Artificial Sequence: targeting sequence/synthetic sequence
ggcaacgcggctcgcgacaataagaagacccgcatcatcccgcgccacctgcagctagcc

SEQ ID NO: 11615 - DNA, 60 bp, Artificial Sequence
  Description of Artificial Sequence: targeting sequence/synthetic sequence
ctgcccgtggacgattgggccctggagatcgcccagcggaaccgggccatcaaccccttc

SEQ ID NO: 11616 - DNA, 60 bp, Artificial Sequence
  Description of Artificial Sequence: targeting sequence/synthetic sequence
tacgtgagcatcgacaagttccggatcttctgcaaggccctgaaccccaaggagatcgag

SEQ ID NO: 11617 - DNA, 60 bp, Artificial Sequence
  Description of Artificial Sequence: targeting sequence/synthetic sequence
aaagatgaatttcagaccctcaacattgtgacaccccgtgtgcggcccgaggactgcagc

SEQ ID NO: 11618 - DNA, 60 bp, Artificial Sequence
  Description of Artificial Sequence: targeting sequence/synthetic sequence
ataggcagccgagagaccgccttcacccacgcggtgagcgccgcgggcgtggtcaacgcc

SEQ ID NO: 11619 - DNA, 60 bp, Artificial Sequence
  Description of Artificial Sequence: targeting sequence/synthetic sequence
agcggcggaaccgccgctctgggctgcctggtgaaggactacttccccgagcccgtgacc

SEQ ID NO: 11620 - DNA, 60 bp, Artificial Sequence
  Description of Artificial Sequence: targeting sequence/synthetic sequence
ccaaagaagggctccaagaaggcggtgactaaggctcagaagaaggacgggaagaagcgc

SEQ ID NO: 11621 - DNA, 60 bp, Artificial Sequence
  Description of Artificial Sequence: targeting sequence/synthetic sequence
cagatcgccagcatccacgacagcaaccccacccaggagaagcgggagcagctgttcaac

SEQ ID NO: 11622 - DNA, 60 bp, Artificial Sequence
  Description of Artificial Sequence: targeting sequence/synthetic sequence
gtgatcctggcagaaaatggcttcttgcccggcaacctggtgggcatccggctgaactgg

SEQ ID NO: 11623 - DNA, 60 bp, Artificial Sequence
  Description of Artificial Sequence: targeting sequence/synthetic sequence
ggcctggagtggatcggccagaagatcagcaagttcatcgactggatcaagagcatgctg

SEQ ID NO: 11624 - DNA, 60 bp, Artificial Sequence
  Description of Artificial Sequence: targeting sequence/synthetic sequence
aagccccaccgctacaggccaggcaccgtggccttgcgtgagatccgccgttatcagaag

SEQ ID NO: 11625 - DNA, 60 bp, Artificial Sequence
  Description of Artificial Sequence: targeting sequence/synthetic sequence
ctgcagctggccatccgcaacgacgaggagctaaacaagttgctgggtaaagtcacaatt

SEQ ID NO: 11626 - DNA, 60 bp, Artificial Sequence
  Description of Artificial Sequence: targeting sequence/synthetic sequence
ctggtacagacagaggagcaatatgtgtttgtgcacgatgccatcctggaagcgtgcctc

SEQ ID NO: 11627 - DNA, 60 bp, Artificial Sequence
  Description of Artificial Sequence: targeting sequence/synthetic sequence
aaaactccagcgcaatttgatgctgatgaacttcgtgctgccatgaagggccttggaact

SEQ ID NO: 11628 - DNA, 60 bp, Artificial Sequence
  Description of Artificial Sequence: targeting sequence/synthetic sequence
cccttccagaggttggtgagggagatcgcgcaggatttcaacactgacctgaggtttcag

SEQ ID NO: 11629 - DNA, 60 bp, Artificial Sequence
  Description of Artificial Sequence: targeting sequence/synthetic sequence
gatgaatttcagaccctcaacattgtgacaccccgtgtgcggcccgaggactgcagcatt

SEQ ID NO: 11630 - DNA, 60 bp, Artificial Sequence
  Description of Artificial Sequence: targeting sequence/synthetic sequence
ggtcctcgtggtctccctggcccccctggtgcacctggtccccaaggcttccaaggtccc

SEQ ID NO: 11631 - DNA, 60 bp, Artificial Sequence
  Description of Artificial Sequence: targeting sequence/synthetic sequence
gaaggaaggaaggcaaaggaggacagtggcaacaaacccatgtcaaaaaaagaaatgatt

SEQ ID NO: 11632 - DNA, 60 bp, Artificial Sequence
  Description of Artificial Sequence: targeting sequence/synthetic sequence
ccaggtatcaaaggtccagctgggatacctggattccctggtatgaaaggacacagaggc

SEQ ID NO: 11633 - DNA, 60 bp, Artificial Sequence
  Description of Artificial Sequence: targeting sequence/synthetic sequence
gccctggccaacctgctcctggtgggcgccctgaccgacaacagcgccaaggccgagagc

SEQ ID NO: 11634 - DNA, 60 bp, Artificial Sequence
  Description of Artificial Sequence: targeting sequence/synthetic sequence
ggcgtgatgaaggtgggctacaccgagatcgacggcaagcacttctacttcgccgagaac

SEQ ID NO: 11635 - DNA, 60 bp, Artificial Sequence
  Description of Artificial Sequence: targeting sequence/synthetic sequence
cgttctaaacctcgaaatgtgcctgcagcatatcgtggtgtgggggatgaccagctgggg

SEQ ID NO: 11636 - DNA, 60 bp, Artificial Sequence
  Description of Artificial Sequence: targeting sequence/synthetic sequence
aagtacggcatcgacgtgaccatccggaacgcctacgacaagaccgccctggacatcgcc

SEQ ID NO: 11637 - DNA, 60 bp, Artificial Sequence
  Description of Artificial Sequence: targeting sequence/synthetic sequence
aagggtgctgctggtcctcctgggccacctggtgctgctggtactcctggtctgcaagga

SEQ ID NO: 11638 - DNA, 60 bp, Artificial Sequence
  Description of Artificial Sequence: targeting sequence/synthetic sequence
gccaacctgctcctggtgggcgccctgaccgacaacagcgccaaggccgagagcaagaaa

SEQ ID NO: 11639 - DNA, 60 bp, Artificial Sequence
  Description of Artificial Sequence: targeting sequence/synthetic sequence
acgcctgttgaagttttatgtaaggggtttcctgcagaatttgcgatgtacttaaactat

SEQ ID NO: 11640 - DNA, 60 bp, Artificial Sequence
  Description of Artificial Sequence: targeting sequence/synthetic sequence
agcaagagcaccagcggcggaaccgccgctctgggctgcctggtgaaggactacttcccc

SEQ ID NO: 11641 - DNA, 60 bp, Artificial Sequence
  Description of Artificial Sequence: targeting sequence/synthetic sequence
ctgaagaagcagctcccaggagtcaagagtgaaggaaagagaaaaggcgatgaggtggat

SEQ ID NO: 11642 - DNA, 60 bp, Artificial Sequence
  Description of Artificial Sequence: targeting sequence/synthetic sequence
ggaggggtgaagaaacctcatcgttacaggcctggtactgtggcgctccgtgaaattaga

SEQ ID NO: 11643 - DNA, 60 bp, Artificial Sequence
  Description of Artificial Sequence: targeting sequence/synthetic sequence
cctgctggggcagggggctacccaggggcttcctatcctggggcctaccccgggcaggca

SEQ ID NO: 11644 - DNA, 60 bp, Artificial Sequence
  Description of Artificial Sequence: targeting sequence/synthetic sequence
tttgtaatcctggctgagaatggttttaggcctgttgatctgctgggcatccgcctccac

SEQ ID NO: 11645 - DNA, 60 bp, Artificial Sequence
  Description of Artificial Sequence: targeting sequence/synthetic sequence
gccccccggaccaacttcaacaatgccgctatcaactaccagaacctgtacctgggcctg

SEQ ID NO: 11646 - DNA, 60 bp, Artificial Sequence
  Description of Artificial Sequence: targeting sequence/synthetic sequence
cccgaggacttcctggaggaggacgagtaccacgccaccaccgagaccgtcattagcatg

SEQ ID NO: 11647 - DNA, 60 bp, Artificial Sequence
  Description of Artificial Sequence: targeting sequence/synthetic sequence
agacgttccctgccagcaacactaccacagtgtcaggcagcgaacaagacctgccccacc

SEQ ID NO: 11648 - DNA, 60 bp, Artificial Sequence
  Description of Artificial Sequence: targeting sequence/synthetic sequence
ccgcgccacctgcaattggccatccgcaatgacgaggagcttaataaactcttggggcgt

SEQ ID NO: 11649 - DNA, 60 bp, Artificial Sequence
  Description of Artificial Sequence: targeting sequence/synthetic sequence
aaggtggacatcctctactaccgcaaggatgcctccagcttccgctgcctggtagatgtg

SEQ ID NO: 11650 - DNA, 60 bp, Artificial Sequence
  Description of Artificial Sequence: targeting sequence/synthetic sequence
atcaacagcgagggccggagagagctgctcgaccacagcggcgagtggatcaacaaggag

SEQ ID NO: 11651 - DNA, 60 bp, Artificial Sequence
  Description of Artificial Sequence: targeting sequence/synthetic sequence
aaaaagggctccaaaaaggcggtgaccaaggcgcagaagaaggatggtaagaagcgcaag

SEQ ID NO: 11652 - DNA, 60 bp, Artificial Sequence
  Description of Artificial Sequence: targeting sequence/synthetic sequence
gcgcaatttgatgctgatgaacttcgtgctgccatgaagggccttggaactgatgaagat

SEQ ID NO: 11653 - DNA, 60 bp, Artificial Sequence
  Description of Artificial Sequence: targeting sequence/synthetic sequence
gcaggagcgcccctggccactgaactgcgctgccagtgcttgcagaccctgcagggaatt

SEQ ID NO: 11654 - DNA, 60 bp, Artificial Sequence
  Description of Artificial Sequence: targeting sequence/synthetic sequence
aacagcgagggccggaaggagctgctcgcccacagcggcaagtggatcaacaaggaggaa

SEQ ID NO: 11655 - DNA, 60 bp, Artificial Sequence
  Description of Artificial Sequence: targeting sequence/synthetic sequence
aagaagcagctcccaggagtcaagagtgaaggaaagagaaaaggcgatgaggtggatgga

SEQ ID NO: 11656 - DNA, 60 bp, Artificial Sequence
  Description of Artificial Sequence: targeting sequence/synthetic sequence
ggtgaaagaggatctgagggctccccaggccacccagggcaaccaggccctcctggacct

SEQ ID NO: 11657 - DNA, 60 bp, Artificial Sequence
  Description of Artificial Sequence: targeting sequence/synthetic sequence
gtggctgtgaacgaggactgtgagctcaggatcctggatttcgggctggcgcgccaggcg

SEQ ID NO: 11658 - DNA, 60 bp, Artificial Sequence
  Description of Artificial Sequence: targeting sequence/synthetic sequence
agcgatggctctttggaagatgacgattatcacgctacaacggaaacaatcattaccatg

SEQ ID NO: 11659 - DNA, 60 bp, Artificial Sequence
  Description of Artificial Sequence: targeting sequence/synthetic sequence
accaacttcaacaatgccgctatcaactaccagaacctgtacctgggcctgcggttcatc

SEQ ID NO: 11660 - DNA, 60 bp, Artificial Sequence
  Description of Artificial Sequence: targeting sequence/synthetic sequence
ggtggggcaccccgggccaacctcaccgtggtgctgctccgtggggagaaggagctgaaa

SEQ ID NO: 11661 - DNA, 60 bp, Artificial Sequence
  Description of Artificial Sequence: targeting sequence/synthetic sequence
tgccaggtggagggtggggcaccccgggccaacctcaccgtggtgctgctccgtggggag

SEQ ID NO: 11662 - DNA, 60 bp, Artificial Sequence
  Description of Artificial Sequence: targeting sequence/synthetic sequence
gtgcggaagctgaccgaggaccggtggaacaagccccagaagaccaagggccaccggggc

SEQ ID NO: 11663 - DNA, 60 bp, Artificial Sequence
  Description of Artificial Sequence: targeting sequence/synthetic sequence
ggcgccgctagcatcaccctgaccgcccaggtgcggcagctgctcagcggcatcgtgcag

SEQ ID NO: 11664 - DNA, 60 bp, Artificial Sequence
  Description of Artificial Sequence: targeting sequence/synthetic sequence
accacaccccggagaatcaagccccctttccccagcgtgaccaagctgaccgaggaccgg

SEQ ID NO: 11665 - DNA, 60 bp, Artificial Sequence
  Description of Artificial Sequence: targeting sequence/synthetic sequence
cacatgagcgaggaaggcaacgaggaatgggagtgcaagcggagctacagcgaccggggc

SEQ ID NO: 11666 - DNA, 60 bp, Artificial Sequence
  Description of Artificial Sequence: targeting sequence/synthetic sequence
atcaagccccctctgcccagcgtgcggaagctggtggaggaccggtggaacaagccccag

SEQ ID NO: 11667 - DNA, 60 bp, Artificial Sequence
  Description of Artificial Sequence: targeting sequence/synthetic sequence
cggatcgtgcagcggatcaaggacttcctgcggaacctggtgccccggaccgagagctgc

SEQ ID NO: 11668 - DNA, 60 bp, Artificial Sequence
  Description of Artificial Sequence: targeting sequence/synthetic sequence
aacaagcgctcgaccatcacttccagggagatccaaacggctgtgcgcctgctgctaccc

SEQ ID NO: 11669 - DNA, 60 bp, Artificial Sequence
  Description of Artificial Sequence: targeting sequence/synthetic sequence
tctggcctcatctatgaggagacccgcggagtgttgaaggtgttcctggagaacgtgatc

SEQ ID NO: 11670 - DNA, 60 bp, Artificial Sequence
  Description of Artificial Sequence: targeting sequence/synthetic sequence
aagctgctcctgaagctgtggaagaaactgctcaagctgctcaagggcggaggccggaga

SEQ ID NO: 11671 - DNA, 60 bp, Artificial Sequence
  Description of Artificial Sequence: targeting sequence/synthetic sequence
gccccgaagaaaggctccaagaaggcagtgacaaaggcccagaagaaggacggcaagaag

SEQ ID NO: 11672 - DNA, 60 bp, Artificial Sequence
  Description of Artificial Sequence: targeting sequence/synthetic sequence
cccgaggtccagttcaactggtacgtggacggcgtggaggtgcataatgccaagacaaag

SEQ ID NO: 11673 - DNA, 60 bp, Artificial Sequence
  Description of Artificial Sequence: targeting sequence/synthetic sequence
gagatgaaacggcggcgggatttctatgcagcgtaccccctgacggaggtccccaacggc

SEQ ID NO: 11674 - DNA, 60 bp, Artificial Sequence
  Description of Artificial Sequence: targeting sequence/synthetic sequence
gagggcaacgaggaatgggagtgcaagcggagctacagcgaccggggctggggcaacggc

SEQ ID NO: 11675 - DNA, 60 bp, Artificial Sequence
  Description of Artificial Sequence: targeting sequence/synthetic sequence
gctggcgagaaaggatcccctggtgctgatggtcctgctggtgctcctggtactcccggg

SEQ ID NO: 11676 - DNA, 60 bp, Artificial Sequence
  Description of Artificial Sequence: targeting sequence/synthetic sequence
gactggggcgccgaggcgtgcacatgctcgcccagccacccccaggacgccttctgcaac

SEQ ID NO: 11677 - DNA, 60 bp, Artificial Sequence
  Description of Artificial Sequence: targeting sequence/synthetic sequence
agactgaactctgtgaccgctgcggacacggccgtgtattactgtgcacatggcagcagc

SEQ ID NO: 11678 - DNA, 60 bp, Artificial Sequence
  Description of Artificial Sequence: targeting sequence/synthetic sequence
accacagacctgaagtacaaccccgcccgggtggaggccttccaccggtacggcaccaca

SEQ ID NO: 11679 - DNA, 60 bp, Artificial Sequence
  Description of Artificial Sequence: targeting sequence/synthetic sequence
gggggaggcgtggtccagcccgggagctccctgagactctcctgtgcagcctctggtttc

SEQ ID NO: 11680 - DNA, 60 bp, Artificial Sequence
  Description of Artificial Sequence: targeting sequence/synthetic sequence
gtaagaatggtgcctgtcctgctgtctctgctgctgcttctgggtcctgctgtcccccag

SEQ ID NO: 11681 - DNA, 60 bp, Artificial Sequence
  Description of Artificial Sequence: targeting sequence/synthetic sequence
aaggcggtgactaaggcgcagaagaaagacggcaagaagcgcaagcgcagccgcaaggag

SEQ ID NO: 11682 - DNA, 60 bp, Artificial Sequence
  Description of Artificial Sequence: targeting sequence/synthetic sequence
attgagctggcggctcgccgaaggagaagtcttccaggactagcatcctcggtgaaagag

SEQ ID NO: 11683 - DNA, 60 bp, Artificial Sequence
  Description of Artificial Sequence: targeting sequence/synthetic sequence
tgcggggcagtgctcatccacccctcctgggtgctgacagcggcccactgcatggatgag

SEQ ID NO: 11684 - DNA, 60 bp, Artificial Sequence
  Description of Artificial Sequence: targeting sequence/synthetic sequence
cggcagatgaccacaaccacaaaccccctgatccggcacgagaaccggatggtgctggcc

SEQ ID NO: 11685 - DNA, 60 bp, Artificial Sequence
  Description of Artificial Sequence: targeting sequence/synthetic sequence
ctcttcctcgtcttcctgggaatctatgtagtcacagtgctggggaacctgggcatgatc

SEQ ID NO: 11686 - DNA, 60 bp, Artificial Sequence
  Description of Artificial Sequence: targeting sequence/synthetic sequence
ggcgccctggccgctgccctgagccccatggagatctacggcctggtgcagcaaagccac

SEQ ID NO: 11687 - DNA, 60 bp, Artificial Sequence
  Description of Artificial Sequence: targeting sequence/synthetic sequence
ggctacagcaacttcgtgagctccgacctggactgcacctacatcagcctgaagcccggc

SEQ ID NO: 11688 - DNA, 60 bp, Artificial Sequence
  Description of Artificial Sequence: targeting sequence/synthetic sequence
ctcgtcatggcaggcacggcctccactgggcggaggaagaggcgtcgcaggaggaaaccc

SEQ ID NO: 11689 - DNA, 60 bp, Artificial Sequence
  Description of Artificial Sequence: targeting sequence/synthetic sequence
cacgaggaattcggcggaggcggaggctacggccggagacggagacggagaggcggaggc

SEQ ID NO: 11690 - DNA, 60 bp, Artificial Sequence
  Description of Artificial Sequence: targeting sequence/synthetic sequence
caggtgaagggcaccggcgccaacggttccttcaagctcaaccgcaagaagctggagggc

SEQ ID NO: 11691 - DNA, 60 bp, Artificial Sequence
  Description of Artificial Sequence: targeting sequence/synthetic sequence
gcccccaccaagacccggagacgggtggtcgagcgggagaagcgggccgtgggcatgggc

SEQ ID NO: 11692 - DNA, 60 bp, Artificial Sequence
  Description of Artificial Sequence: targeting sequence/synthetic sequence
gccgctggcgccctggccgctgccctgagccccatggagatctacggcctggtgcagcaa

SEQ ID NO: 11693 - DNA, 60 bp, Artificial Sequence
  Description of Artificial Sequence: targeting sequence/synthetic sequence
cccatggccgagcggcagaacgacagctggctgaagaaattcaccgagatgaccaacgcc

SEQ ID NO: 11694 - DNA, 60 bp, Artificial Sequence
  Description of Artificial Sequence: targeting sequence/synthetic sequence
ggcggaaagctggacagctgggagaagatccggctgcggcccggcggacggaagaaatac

SEQ ID NO: 11695 - DNA, 60 bp, Artificial Sequence
  Description of Artificial Sequence: targeting sequence/synthetic sequence
gcagccaaatttgtcatccactgtcacatccctcagtggggctccgacaaatgtgaagaa

SEQ ID NO: 11696 - DNA, 60 bp, Artificial Sequence
  Description of Artificial Sequence: targeting sequence/synthetic sequence
aagggctccaagaaggcagtgaccaaagcgcagaagaaagatggcaagaagcgcaagcgc

SEQ ID NO: 11697 - DNA, 60 bp, Artificial Sequence
  Description of Artificial Sequence: targeting sequence/synthetic sequence
ggcgagagaggtttccctggcgagcgtggtgtgcaaggtccccctggtcctgctggtccc

SEQ ID NO: 11698 - DNA, 60 bp, Artificial Sequence
  Description of Artificial Sequence: targeting sequence/synthetic sequence
cggagaccccctctgcccagcgtgaccaagctgaccgaggaccggtggaacgagcggcag

SEQ ID NO: 11699 - DNA, 60 bp, Artificial Sequence
  Description of Artificial Sequence: targeting sequence/synthetic sequence
cgggccagcgtgctgagcggcggagagctggaccggtgggagaagatccggctgcggccc

SEQ ID NO: 11700 - DNA, 60 bp, Artificial Sequence
  Description of Artificial Sequence: targeting sequence/synthetic sequence
tcatgctccgtgatgcatgaggctctgcacaaccactacacgcagaagagcctctccctg

SEQ ID NO: 11701 - DNA, 60 bp, Artificial Sequence
  Description of Artificial Sequence: targeting sequence/synthetic sequence
gccgtgggccgggtggccgacaccatcgccagcggccccgtgaacaccgagcagatcccc

SEQ ID NO: 11702 - DNA, 60 bp, Artificial Sequence
  Description of Artificial Sequence: targeting sequence/synthetic sequence
gccttgcgcgaaatccgtcgctaccagaagtccaccgagctgctgatccggaagctgccg

SEQ ID NO: 11703 - DNA, 60 bp, Artificial Sequence
  Description of Artificial Sequence: targeting sequence/synthetic sequence
atcgtcataggagaaggctcacaaatgggcctggacgagtgtcagtttcagttccgcaat

SEQ ID NO: 11704 - DNA, 60 bp, Artificial Sequence
  Description of Artificial Sequence: targeting sequence/synthetic sequence
gtcctcctggtattgggatttgaggtccaggggacccaacagccccagcaagatgagatg

SEQ ID NO: 11705 - DNA, 60 bp, Artificial Sequence
  Description of Artificial Sequence: targeting sequence/synthetic sequence
aagcggatcgtgcagcggatcaaggacttcctgcggaacctggtgccccggaccgagagc

SEQ ID NO: 11706 - DNA, 60 bp, Artificial Sequence
  Description of Artificial Sequence: targeting sequence/synthetic sequence
ctggacaagtgggagaagatccggctgcggcccggcggaaagaaacagtaccggctgaag

SEQ ID NO: 11707 - DNA, 60 bp, Artificial Sequence
  Description of Artificial Sequence: targeting sequence/synthetic sequence
cggggcaagaaagccgacgagctggagaagatccggctgcggcccagcggcaagaaaaag

SEQ ID NO: 11708 - DNA, 60 bp, Artificial Sequence
  Description of Artificial Sequence: targeting sequence/synthetic sequence
ggcagcgaggaactgaagagcctgttcaacaccgtggccgtgctgtactatgtgcaccag

SEQ ID NO: 11709 - DNA, 60 bp, Artificial Sequence
  Description of Artificial Sequence: targeting sequence/synthetic sequence
aaatcgaccggtggtaaagcacccaggaagcaactggctacaaaagccgctcgcaagagt

SEQ ID NO: 11710 - DNA, 60 bp, Artificial Sequence
  Description of Artificial Sequence: targeting sequence/synthetic sequence
gctatggggattatgaactccttcgtcaacgacattttcgagcgcattgcaggcgaggct

SEQ ID NO: 11711 - DNA, 60 bp, Artificial Sequence
  Description of Artificial Sequence: targeting sequence/synthetic sequence
aaactcttaagtatatctggaaagcggtctgcccctggaggtggtagcaaggttccacag

SEQ ID NO: 11712 - DNA, 60 bp, Artificial Sequence
  Description of Artificial Sequence: targeting sequence/synthetic sequence
ggcagcgagaacctgaagagcctgttcaacaccgtgtgcgtgatctactgcctgcacgcc

SEQ ID NO: 11713 - DNA, 60 bp, Artificial Sequence
  Description of Artificial Sequence: targeting sequence/synthetic sequence
atggtgcctgtcctgctgtctctgctgctgcttctgggtcctgctgtcccccaggagaac

SEQ ID NO: 11714 - DNA, 60 bp, Artificial Sequence
  Description of Artificial Sequence: targeting sequence/synthetic sequence
aagtccaccggtggcaaagcgccgcgcaagcagctggccactaaggcggctcggaaaagc

SEQ ID NO: 11715 - DNA, 60 bp, Artificial Sequence
  Description of Artificial Sequence: targeting sequence/synthetic sequence
ggtgaacgtggtgcagctggtcttccagggcctaagggtgacagaggtgatgctggtccc

SEQ ID NO: 11716 - DNA, 60 bp, Artificial Sequence
  Description of Artificial Sequence: targeting sequence/synthetic sequence
ctggttcagaagattgagctggcggctcgccgaaggagaagtcttccaggactagcatcc

SEQ ID NO: 11717 - DNA, 60 bp, Artificial Sequence
  Description of Artificial Sequence: targeting sequence/synthetic sequence
ttaagtatatctggaaagcggtctgcccctggaggtggtagcaaggttccacagaaaaaa

SEQ ID NO: 11718 - DNA, 60 bp, Artificial Sequence
  Description of Artificial Sequence: targeting sequence/synthetic sequence
cccaccaaggccaagcggagagtggtccagcgggagaagcgggccgtgggcatgctgggc

SEQ ID NO: 11719 - DNA, 60 bp, Artificial Sequence
  Description of Artificial Sequence: targeting sequence/synthetic sequence
ggcggcgaggccgggatcacccgatcggtggtggccaccactcgagcccgggtctgccgt

SEQ ID NO: 11720 - DNA, 60 bp, Artificial Sequence
  Description of Artificial Sequence: targeting sequence/synthetic sequence
ggaaagggaggcgccaagcgccatcgcaaagtgctgcgtgacaacatacagggcatcacg

SEQ ID NO: 11721 - DNA, 60 bp, Artificial Sequence
  Description of Artificial Sequence: targeting sequence/synthetic sequence
agccggagcaaggagcggagcaagaaacggagaaagaaaaagagctccaagcggaagcac

SEQ ID NO: 11722 - DNA, 60 bp, Artificial Sequence
  Description of Artificial Sequence: targeting sequence/synthetic sequence
agaagagaggaagagggcattcagctccggaagcagaagcgagagcaacaactttttaaa

SEQ ID NO: 11723 - DNA, 60 bp, Artificial Sequence
  Description of Artificial Sequence: targeting sequence/synthetic sequence
agccaccggcagatggagaccacaaccaaccccctgatccggcacgagaaccggatggtg

SEQ ID NO: 11724 - DNA, 60 bp, Artificial Sequence
  Description of Artificial Sequence: targeting sequence/synthetic sequence
gacagcgacggccaggacctgctcttcaccaaccagctgaaggagcaccccaccgacttc

SEQ ID NO: 11725 - DNA, 60 bp, Artificial Sequence
  Description of Artificial Sequence: targeting sequence/synthetic sequence
cgcgagatccgccgctaccagaagtccactgagctgctaatacgcaagttgcccttccag

SEQ ID NO: 11726 - DNA, 60 bp, Artificial Sequence
  Description of Artificial Sequence: targeting sequence/synthetic sequence
aagctgctcaagctgctcctgaagctgtggaagaaactgctcaagctgctcaagggcgga

SEQ ID NO: 11727 - DNA, 60 bp, Artificial Sequence
  Description of Artificial Sequence: targeting sequence/synthetic sequence
ggcctcgtcatggcaggcacggcctccactgggcggaggaagaggcgtcgcaggaggaaa

SEQ ID NO: 11728 - DNA, 60 bp, Artificial Sequence
  Description of Artificial Sequence: targeting sequence/synthetic sequence
accatgggcgccaccagcatgaccctgaccgtgcaggcccggctgctcctgagcggcatc

SEQ ID NO: 11729 - DNA, 60 bp, Artificial Sequence
  Description of Artificial Sequence: targeting sequence/synthetic sequence
ttggagtatgaccaccctctgaagaagctgacagaagagtttgggcctcacacaaaggct

SEQ ID NO: 11730 - DNA, 60 bp, Artificial Sequence
  Description of Artificial Sequence: targeting sequence/synthetic sequence
ggctggcacaccacagacctgaagtacaaccccgcccgggtggaggccttccaccggtac

SEQ ID NO: 11731 - DNA, 60 bp, Artificial Sequence
  Description of Artificial Sequence: targeting sequence/synthetic sequence
ttccgctttgatgtggcatggttcctgacggagacttcgcccttcatgtggtccaacctg

SEQ ID NO: 11732 - DNA, 60 bp, Artificial Sequence
  Description of Artificial Sequence: targeting sequence/synthetic sequence
ggcgaggccgggatcacccgatcggtggtggccaccactcgagcccgggtctgccgtcgc

SEQ ID NO: 11733 - DNA, 60 bp, Artificial Sequence
  Description of Artificial Sequence: targeting sequence/synthetic sequence
gcctgcggggcagtgctcatccacccctcctgggtgctgacagcggcccactgcatggat

SEQ ID NO: 11734 - DNA, 60 bp, Artificial Sequence
  Description of Artificial Sequence: targeting sequence/synthetic sequence
ggcttccgctttgatgtggcatggttcctgacggagacttcgcccttcatgtggtccaac

SEQ ID NO: 11735 - DNA, 60 bp, Artificial Sequence
  Description of Artificial Sequence: targeting sequence/synthetic sequence
ggcagcgaggaacggaagagcctgtacaacaccgtggccaccctgtactgcgtgcaccag

SEQ ID NO: 11736 - DNA, 60 bp, Artificial Sequence
  Description of Artificial Sequence: targeting sequence/synthetic sequence
ggaggcttggtccagcctggagggtccctgagactctcgtgtgcagcctctggattcatc

SEQ ID NO: 11737 - DNA, 60 bp, Artificial Sequence
  Description of Artificial Sequence: targeting sequence/synthetic sequence
atgcgcaggaggagggaggaagaaggactgcagttacgaaagcagaaaagagaagagcag

SEQ ID NO: 11738 - DNA, 60 bp, Artificial Sequence
  Description of Artificial Sequence: targeting sequence/synthetic sequence
aagggtaccggagcctcgggttccttcaagctcaacaagaaggcgtcctccgtggaaacc

SEQ ID NO: 11739 - DNA, 60 bp, Artificial Sequence
  Description of Artificial Sequence: targeting sequence/synthetic sequence
ccagggcctaagggtgacagaggtgatgctggtcccaaaggtgctgatggctctcctggc

SEQ ID NO: 11740 - DNA, 60 bp, Artificial Sequence
  Description of Artificial Sequence: targeting sequence/synthetic sequence
gtccagttcaactggtacgtggacggcgtggaggtgcataatgccaagacaaagccacgg

SEQ ID NO: 11741 - DNA, 60 bp, Artificial Sequence
  Description of Artificial Sequence: targeting sequence/synthetic sequence
gtgaagatccagaagttcatcgagtggctgaaggtgaagaacctgcccgaggtgaaggag

SEQ ID NO: 11742 - DNA, 60 bp, Artificial Sequence
  Description of Artificial Sequence: targeting sequence/synthetic sequence
aagtttgtgatccactgtaatagtccagtttggggtgcagacaagtgtgaagaacttctg

SEQ ID NO: 11743 - DNA, 60 bp, Artificial Sequence
  Description of Artificial Sequence: targeting sequence/synthetic sequence
ggtctgaccggccccattggtcctcctggccctgctggtgcccctggtgacaagggtgaa

SEQ ID NO: 11744 - DNA, 60 bp, Artificial Sequence
  Description of Artificial Sequence: targeting sequence/synthetic sequence
ctgggggactggggcgccgaggcgtgcacatgctcgcccagccacccccaggacgccttc

SEQ ID NO: 11745 - DNA, 60 bp, Artificial Sequence
  Description of Artificial Sequence: targeting sequence/synthetic sequence
cggagccaccggcagatggtggccaccacaaaccccctgatccggcacgagaaccggatg

SEQ ID NO: 11746 - DNA, 60 bp, Artificial Sequence
  Description of Artificial Sequence: targeting sequence/synthetic sequence
aacttcgtgagctccgacctggactgcacctacatcagcctgaagcccggcagctacaag

SEQ ID NO: 11747 - DNA, 60 bp, Artificial Sequence
  Description of Artificial Sequence: targeting sequence/synthetic sequence
gcgtgcacatgctcgcccagccacccccaggacgccttctgcaactccgacatcgtgatc

SEQ ID NO: 11748 - DNA, 60 bp, Artificial Sequence
  Description of Artificial Sequence: targeting sequence/synthetic sequence
ggcggtgccaagtgccatcgcaaggtactgagcgataatattcagggcattaccaagtgc

SEQ ID NO: 11749 - DNA, 60 bp, Artificial Sequence
  Description of Artificial Sequence: targeting sequence/synthetic sequence
ggtgcacctggagctccaggaggcaagggtgatgctggtgcccctggtgaacgtggacct

SEQ ID NO: 11750 - DNA, 60 bp, Artificial Sequence
  Description of Artificial Sequence: targeting sequence/synthetic sequence
acccaggagaagatcaagtgcgagatcgacaccctgcacgacctgagctgcaagttcctg

SEQ ID NO: 11751 - DNA, 60 bp, Artificial Sequence
  Description of Artificial Sequence: targeting sequence/synthetic sequence
ctgaagttgagctctgtgaacgccgcggacacggctgtgtattactgtgcgagagttatt

SEQ ID NO: 11752 - DNA, 60 bp, Artificial Sequence
  Description of Artificial Sequence: targeting sequence/synthetic sequence
gaagctggaaaacctggtcgtcctggtgagcgtgggcctcctgggcctcagggtgctcga

SEQ ID NO: 11753 - DNA, 60 bp, Artificial Sequence
  Description of Artificial Sequence: targeting sequence/synthetic sequence
gcaggcacggcctccactgggcggaggaagaggcgtcgcaggaggaaacccaagcagaaa

SEQ ID NO: 11754 - DNA, 60 bp, Artificial Sequence
  Description of Artificial Sequence: targeting sequence/synthetic sequence
cgcatttccggtcttatctatgaggagactcgaggtgtgcttaaggttttcttagagaac

SEQ ID NO: 11755 - DNA, 60 bp, Artificial Sequence
  Description of Artificial Sequence: targeting sequence/synthetic sequence
ggcatccccatggccgagcggcagaacaataactggctgaagaaattcaccgagatgacc

SEQ ID NO: 11756 - DNA, 60 bp, Artificial Sequence
  Description of Artificial Sequence: targeting sequence/synthetic sequence
tttcttgtcctcctggtattgggatttgaggtccaggggacccaacagccccagcaagat

SEQ ID NO: 11757 - DNA, 60 bp, Artificial Sequence
  Description of Artificial Sequence: targeting sequence/synthetic sequence
atcgcccccaagaaaaccaagccccctctgcccagcgtgcagaagctggtggaggaccgg

SEQ ID NO: 11758 - DNA, 60 bp, Artificial Sequence
  Description of Artificial Sequence: targeting sequence/synthetic sequence
aacatcttctcatgctccgtgatgcatgaggctctgcacaaccgcttcacgcagaagagc

SEQ ID NO: 11759 - DNA, 60 bp, Artificial Sequence
  Description of Artificial Sequence: targeting sequence/synthetic sequence
gggggcttcttcctgcgcatccaccccgacggccgagttgacggggtccgggagaagagc

SEQ ID NO: 11760 - DNA, 60 bp, Artificial Sequence
  Description of Artificial Sequence: targeting sequence/synthetic sequence
ggcgaaaatggagctcctggacccatgggtccaagaggggctcctggtgagcgaggacgg

SEQ ID NO: 11761 - DNA, 60 bp, Artificial Sequence
  Description of Artificial Sequence: targeting sequence/synthetic sequence
gagcacgaggaattcggcggaggcggaggctacggccggagacggagacggagaggcgga

SEQ ID NO: 11762 - DNA, 60 bp, Artificial Sequence
  Description of Artificial Sequence: targeting sequence/synthetic sequence
gtgcggaagctgaccgaggaccggtggaacaagccccagcaaaccaagggccaccggggc

SEQ ID NO: 11763 - DNA, 60 bp, Artificial Sequence
  Description of Artificial Sequence: targeting sequence/synthetic sequence
aaaaaagcgttggctgccgccggctatgatgtggagaaaaacaacagccgtatcaaactt

SEQ ID NO: 11764 - DNA, 60 bp, Artificial Sequence
  Description of Artificial Sequence: targeting sequence/synthetic sequence
cctggtggtaaaggcgaaatgggtcccgctggcattcctggagctcctggactgatggga

SEQ ID NO: 11765 - DNA, 60 bp, Artificial Sequence
  Description of Artificial Sequence: targeting sequence/synthetic sequence
agcgtgcaggagaagatcttcatcgagatcaacaccctgcacgacctgagcctgaagttc

SEQ ID NO: 11766 - DNA, 60 bp, Artificial Sequence
  Description of Artificial Sequence: targeting sequence/synthetic sequence
agcagggcctgcacctgtgtcccaccccacccacagacggccttctgcaattccgacctc

SEQ ID NO: 11767 - DNA, 60 bp, Artificial Sequence
  Description of Artificial Sequence: targeting sequence/synthetic sequence
gaccaccctctgaagaagctgacagaagagtttgggcctcacacaaaggctgtgagtgga

SEQ ID NO: 11768 - DNA, 60 bp, Artificial Sequence
  Description of Artificial Sequence: targeting sequence/synthetic sequence
agcgtgctgagcggcggaaagctggaccggtgggagaagatccggctgcggcccggcgga

SEQ ID NO: 11769 - DNA, 60 bp, Artificial Sequence
  Description of Artificial Sequence: targeting sequence/synthetic sequence
aatgaaatgaagagaagaagggatttttatgcagctcatccttctgctgatgctgccaat

SEQ ID NO: 11770 - DNA, 60 bp, Artificial Sequence
  Description of Artificial Sequence: targeting sequence/synthetic sequence
aaacggcggcgggatttctatgcagcgtaccccctgacggaggtccccaacggctccaat

SEQ ID NO: 11771 - DNA, 60 bp, Artificial Sequence
  Description of Artificial Sequence: targeting sequence/synthetic sequence
cggagcaaggagcggagcaagaaacggagaaagaaaaagagctccaagcggaagcacaag

SEQ ID NO: 11772 - DNA, 60 bp, Artificial Sequence
  Description of Artificial Sequence: targeting sequence/synthetic sequence
cgtggtgtggtcggcctgcctggtcagagaggagagagaggcttccctggtcttcctggc

SEQ ID NO: 11773 - DNA, 60 bp, Artificial Sequence
  Description of Artificial Sequence: targeting sequence/synthetic sequence
agcaacgggggccacttcctgaggatccttccggatggcacagtggatgggacaagggac

SEQ ID NO: 11774 - DNA, 60 bp, Artificial Sequence
  Description of Artificial Sequence: targeting sequence/synthetic sequence
cgggtggccgacaccatcgcccggggccccagcaacagcgagcagatccccgccctgacc

SEQ ID NO: 11775 - DNA, 60 bp, Artificial Sequence
  Description of Artificial Sequence: targeting sequence/synthetic sequence
ccccctctgcccagcgtgcagaagctggtggaggaccggtggaacaagccccagaagacc

SEQ ID NO: 11776 - DNA, 60 bp, Artificial Sequence
  Description of Artificial Sequence: targeting sequence/synthetic sequence
ctctttgggctgttcctgtccatgtacctggtcactgtgctcgggaacctgctcatcatc

SEQ ID NO: 11777 - DNA, 60 bp, Artificial Sequence
  Description of Artificial Sequence: targeting sequence/synthetic sequence
gaggggttgcggctgttggctcaagcagaagactttgaccagatgaagaacgtagcggat

SEQ ID NO: 11778 - DNA, 60 bp, Artificial Sequence
  Description of Artificial Sequence: targeting sequence/synthetic sequence
tcgaccatcacttcgagggagatccagacggccgtgcgcctactgctacccggggaattg

SEQ ID NO: 11779 - DNA, 60 bp, Artificial Sequence
  Description of Artificial Sequence: targeting sequence/synthetic sequence
gaacaaggccctgctggctcccccggattccagggtctccctggtcctgctggtcctcca

SEQ ID NO: 11780 - DNA, 60 bp, Artificial Sequence
  Description of Artificial Sequence: targeting sequence/synthetic sequence
ggtcctgctggtgctcctggtactcccgggcctcaaggtattgctggacagcgtggtgtg

SEQ ID NO: 11781 - DNA, 60 bp, Artificial Sequence
  Description of Artificial Sequence: targeting sequence/synthetic sequence
ggagaaggctcacaaatgggcctggacgagtgtcagtttcagttccgcaatggccgctgg

SEQ ID NO: 11782 - DNA, 60 bp, Artificial Sequence
  Description of Artificial Sequence: targeting sequence/synthetic sequence
atagctggacctcgtggtagccctggtgagagaggtgaaactggccctccaggacctgct

SEQ ID NO: 11783 - DNA, 60 bp, Artificial Sequence
  Description of Artificial Sequence: targeting sequence/synthetic sequence
cctgagggcctggcgcagctggctcgggctgacgactatgaacaggtcaagaacgtggcc

SEQ ID NO: 11784 - DNA, 60 bp, Artificial Sequence
  Description of Artificial Sequence: targeting sequence/synthetic sequence
caggacctgctcttcaccaaccagctgaaggagcaccccaccgacttcagcgtggagttc

SEQ ID NO: 11785 - protein, 20 aa, Artificial Sequence
  Description of Artificial Sequence: targeting sequence/synthetic sequence
RIGVGAPVYMAAVLEYLTAE

SEQ ID NO: 11786 - protein, 20 aa, Artificial Sequence
  Description of Artificial Sequence: targeting sequence/synthetic sequence
PSHHCSTATPTSSHRHESHT

SEQ ID NO: 11787 - protein, 20 aa, Artificial Sequence
  Description of Artificial Sequence: targeting sequence/synthetic sequence
GVAPTKARRRVVQREKRAVG

SEQ ID NO: 11788 - protein, 20 aa, Artificial Sequence
  Description of Artificial Sequence: targeting sequence/synthetic sequence
QLKHIVWASRELERFAINPG

SEQ ID NO: 11789 - protein, 20 aa, Artificial Sequence
  Description of Artificial Sequence: targeting sequence/synthetic sequence
IPASFGTRAPPMVRKIAVRR

SEQ ID NO: 11790 - protein, 20 aa, Artificial Sequence
  Description of Artificial Sequence: targeting sequence/synthetic sequence
KEISLSYSAGALASCMGLIY

SEQ ID NO: 11791 - protein, 20 aa, Artificial Sequence
  Description of Artificial Sequence: targeting sequence/synthetic sequence
RIAGEASRLAHYNKRSTITS

SEQ ID NO: 11792 - protein, 20 aa, Artificial Sequence
  Description of Artificial Sequence: targeting sequence/synthetic sequence
RVGAGAPVYLAAVLEYLTAE

SEQ ID NO: 11793 - protein, 20 aa, Artificial Sequence
  Description of Artificial Sequence: targeting sequence/synthetic sequence
GVAPTKAKRRVVQREKRAVG

SEQ ID NO: 11794 - protein, 20 aa, Artificial Sequence
  Description of Artificial Sequence: targeting sequence/synthetic sequence
PLGVAPTKAKRRVVQREKRA

SEQ ID NO: 11795 - protein, 20 aa, Artificial Sequence
  Description of Artificial Sequence: targeting sequence/synthetic sequence
VPCPVPSTPPTPSPSTPPTP

SEQ ID NO: 11796 - protein, 20 aa, Artificial Sequence
  Description of Artificial Sequence: targeting sequence/synthetic sequence
KEVALSYSAGALASCMGLIY

SEQ ID NO: 11797 - protein, 20 aa, Artificial Sequence
  Description of Artificial Sequence: targeting sequence/synthetic sequence
KLTEDRWNKPQQTKGHRGSH

SEQ ID NO: 11798 - protein, 20 aa, Artificial Sequence
  Description of Artificial Sequence: targeting sequence/synthetic sequence
HHCSTATPTSSHRHESHTWS

SEQ ID NO: 11799 - protein, 20 aa, Artificial Sequence
  Description of Artificial Sequence: targeting sequence/synthetic sequence
VPSTPPTPSPSTPPTPSPSC

SEQ ID NO: 11800 - protein, 20 aa, Artificial Sequence
  Description of Artificial Sequence: targeting sequence/synthetic sequence
GAPVYLAAVLEYLTAEILEL

SEQ ID NO: 11801 - protein, 20 aa, Artificial Sequence
  Description of Artificial Sequence: targeting sequence/synthetic sequence
LKSIPASFGTRAPPMVRKIA

SEQ ID NO: 11802 - protein, 20 aa, Artificial Sequence
  Description of Artificial Sequence: targeting sequence/synthetic sequence
LKHLVWASRELEKFTLNPGL

SEQ ID NO: 11803 - protein, 20 aa, Artificial Sequence
  Description of Artificial Sequence: targeting sequence/synthetic sequence
VQKLVEDRWNKPQKTRGHRG

SEQ ID NO: 11804 - protein, 20 aa, Artificial Sequence
  Description of Artificial Sequence: targeting sequence/synthetic sequence
AVMALQEACEAYLVGLFEDT

SEQ ID NO: 11805 - protein, 20 aa, Artificial Sequence
  Description of Artificial Sequence: targeting sequence/synthetic sequence
AKAKSRSSRAGLQFPVGRVH

SEQ ID NO: 11806 - protein, 20 aa, Artificial Sequence
  Description of Artificial Sequence: targeting sequence/synthetic sequence
ISDFFAKRKRSAPEKSSGDV

SEQ ID NO: 11807 - protein, 20 aa, Artificial Sequence
  Description of Artificial Sequence: targeting sequence/synthetic sequence
SVFPLSVSDSPARLQSLLRV

SEQ ID NO: 11808 - protein, 20 aa, Artificial Sequence
  Description of Artificial Sequence: targeting sequence/synthetic sequence
PGGKKKYRLKHIVWAANELG

SEQ ID NO: 11809 - protein, 20 aa, Artificial Sequence
  Description of Artificial Sequence: targeting sequence/synthetic sequence
GRGRTCSRTVRAELSFSVSQ

SEQ ID NO: 11810 - protein, 20 aa, Artificial Sequence
  Description of Artificial Sequence: targeting sequence/synthetic sequence
YSVPKTLQARFVKQIDFRPK

SEQ ID NO: 11811 - protein, 20 aa, Artificial Sequence
  Description of Artificial Sequence: targeting sequence/synthetic sequence
IFERIAGEASRLAHYNKRST

SEQ ID NO: 11812 - protein, 20 aa, Artificial Sequence
  Description of Artificial Sequence: targeting sequence/synthetic sequence
FLGFLATAGSAMGAASLTVS

SEQ ID NO: 11813 - protein, 20 aa, Artificial Sequence
  Description of Artificial Sequence: targeting sequence/synthetic sequence
ESGGGLVQPGGSLRLSCVAS

SEQ ID NO: 11814 - protein, 20 aa, Artificial Sequence
  Description of Artificial Sequence: targeting sequence/synthetic sequence
TDLRFQSSAVMALQEACEAY

SEQ ID NO: 11815 - protein, 20 aa, Artificial Sequence
  Description of Artificial Sequence: targeting sequence/synthetic sequence
SKKKYRLKHLVWASRELERF

SEQ ID NO: 11816 - protein, 20 aa, Artificial Sequence
  Description of Artificial Sequence: targeting sequence/synthetic sequence
MGAVSVALTGQARQLLSGIV

SEQ ID NO: 11817 - protein, 20 aa, Artificial Sequence
  Description of Artificial Sequence: targeting sequence/synthetic sequence
LQLAIRNDEELNKLLGGVTI

SEQ ID NO: 11818 - protein, 20 aa, Artificial Sequence
  Description of Artificial Sequence: targeting sequence/synthetic sequence
EKRAVGIVGAMFLGFLGAAG

SEQ ID NO: 11819 - protein, 20 aa, Artificial Sequence
  Description of Artificial Sequence: targeting sequence/synthetic sequence
YLFLLLLLIYLMTVLGNLLI

SEQ ID NO: 11820 - protein, 20 aa, Artificial Sequence
  Description of Artificial Sequence: targeting sequence/synthetic sequence
TMGAAAVTLTVQARQLLPGI

SEQ ID NO: 11821 - protein, 20 aa, Artificial Sequence
  Description of Artificial Sequence: targeting sequence/synthetic sequence
KAASGEAKPKAKKAGAAKAK

SEQ ID NO: 11822 - protein, 20 aa, Artificial Sequence
  Description of Artificial Sequence: targeting sequence/synthetic sequence
VFPLSVSDSPARLQSLLRVL

SEQ ID NO: 11823 - protein, 20 aa, Artificial Sequence
  Description of Artificial Sequence: targeting sequence/synthetic sequence
MNEYSVPKTLQARFVKQIDF

SEQ ID NO: 11824 - protein, 20 aa, Artificial Sequence
  Description of Artificial Sequence: targeting sequence/synthetic sequence
PLFWVVLLVYLVTLLGNSLI

SEQ ID NO: 11825 - protein, 20 aa, Artificial Sequence
  Description of Artificial Sequence: targeting sequence/synthetic sequence
DSGKAKAKAVSRSQRAGLQF

SEQ ID NO: 11826 - protein, 20 aa, Artificial Sequence
  Description of Artificial Sequence: targeting sequence/synthetic sequence
KLALNKLSLNLYENQVVSFL

SEQ ID NO: 11827 - protein, 20 aa, Artificial Sequence
  Description of Artificial Sequence: targeting sequence/synthetic sequence
FQSSAVMALQEACEAYLVGL

SEQ ID NO: 11828 - protein, 20 aa, Artificial Sequence
  Description of Artificial Sequence: targeting sequence/synthetic sequence
FRSVFPLSVSDSPARLQSLL

SEQ ID NO: 11829 - protein, 20 aa, Artificial Sequence
  Description of Artificial Sequence: targeting sequence/synthetic sequence
SSAVMALQEACEAYLVGLFE

SEQ ID NO: 11830 - protein, 20 aa, Artificial Sequence
  Description of Artificial Sequence: targeting sequence/synthetic sequence
STMGAASITLTAQVRQLLSG

SEQ ID NO: 11831 - protein, 20 aa, Artificial Sequence
  Description of Artificial Sequence: targeting sequence/synthetic sequence
GKARAKAKTRSSRAGLQFPV

SEQ ID NO: 11832 - protein, 20 aa, Artificial Sequence
  Description of Artificial Sequence: targeting sequence/synthetic sequence
FAKRKRSAPEKSSGDVPAPC

SEQ ID NO: 11833 - protein, 20 aa, Artificial Sequence
  Description of Artificial Sequence: targeting sequence/synthetic sequence
HYNKRSTITSREIQTAVRLL

SEQ ID NO: 11834 - protein, 20 aa, Artificial Sequence
  Description of Artificial Sequence: targeting sequence/synthetic sequence
AVFFGFLGAAGSTMGAASIT

SEQ ID NO: 11835 - protein, 20 aa, Artificial Sequence
  Description of Artificial Sequence: targeting sequence/synthetic sequence
AIARVADTMPSGPTNSEAVP

SEQ ID NO: 11836 - protein, 20 aa, Artificial Sequence
  Description of Artificial Sequence: targeting sequence/synthetic sequence
VALREIRRYQKSTELLIRKL

SEQ ID NO: 11837 - protein, 20 aa, Artificial Sequence
  Description of Artificial Sequence: targeting sequence/synthetic sequence
LLFVLFFAIYLLTLLENALI

SEQ ID NO: 11838 - protein, 20 aa, Artificial Sequence
  Description of Artificial Sequence: targeting sequence/synthetic sequence
KRGVLVLGFLGFLTTAGAAM

SEQ ID NO: 11839 - protein, 20 aa, Artificial Sequence
  Description of Artificial Sequence: targeting sequence/synthetic sequence
HKRGVLVLGFLGFLTTAGAA

SEQ ID NO: 11840 - protein, 20 aa, Artificial Sequence
  Description of Artificial Sequence: targeting sequence/synthetic sequence
QKKRRKLGAEEAARAVDDGG

SEQ ID NO: 11841 - protein, 20 aa, Artificial Sequence
  Description of Artificial Sequence: targeting sequence/synthetic sequence
RPGTVALREIRRYQKSTELL

SEQ ID NO: 11842 - protein, 20 aa, Artificial Sequence
  Description of Artificial Sequence: targeting sequence/synthetic sequence
VYLAAVLEYLTAEILELAGN

SEQ ID NO: 11843 - protein, 20 aa, Artificial Sequence
  Description of Artificial Sequence: targeting sequence/synthetic sequence
QQLQKKRRKLGAEEAARAVD

SEQ ID NO: 11844 - protein, 20 aa, Artificial Sequence
  Description of Artificial Sequence: targeting sequence/synthetic sequence
GVLKVFLENVIRDAVTYTEH

SEQ ID NO: 11845 - protein, 20 aa, Artificial Sequence
  Description of Artificial Sequence: targeting sequence/synthetic sequence
YNKRSTITSREIQTAVRLLL

SEQ ID NO: 11846 - protein, 20 aa, Artificial Sequence
  Description of Artificial Sequence: targeting sequence/synthetic sequence
ASTDQLKSVGLNLEGSGVST

SEQ ID NO: 11847 - protein, 20 aa, Artificial Sequence
  Description of Artificial Sequence: targeting sequence/synthetic sequence
GKGDAGAPGERGPPGLAGAP

SEQ ID NO: 11848 - protein, 20 aa, Artificial Sequence
  Description of Artificial Sequence: targeting sequence/synthetic sequence
TVQREKRAVGIGAVFLGFLG

SEQ ID NO: 11849 - protein, 20 aa, Artificial Sequence
  Description of Artificial Sequence: targeting sequence/synthetic sequence
AIRNDEELNKLLGGVTIAQG

SEQ ID NO: 11850 - protein, 20 aa, Artificial Sequence
  Description of Artificial Sequence: targeting sequence/synthetic sequence
ESGGGVVQPGSSLRLSCAAS

SEQ ID NO: 11851 - protein, 20 aa, Artificial Sequence
  Description of Artificial Sequence: targeting sequence/synthetic sequence
QGPSGASGERGPPGPMGPPG

SEQ ID NO: 11852 - protein, 20 aa, Artificial Sequence
  Description of Artificial Sequence: targeting sequence/synthetic sequence
GGRGRTCSRTVRAELSFSVS

SEQ ID NO: 11853 - protein, 20 aa, Artificial Sequence
  Description of Artificial Sequence: targeting sequence/synthetic sequence
VEEHLWFYSRLKSMAQEEIR

SEQ ID NO: 11854 - protein, 20 aa, Artificial Sequence
  Description of Artificial Sequence: targeting sequence/synthetic sequence
DKKLALNKLSLNLYENQVVS

SEQ ID NO: 11855 - protein, 20 aa, Artificial Sequence
  Description of Artificial Sequence: targeting sequence/synthetic sequence
GSTMGAASVTLTVQARLLLS

SEQ ID NO: 11856 - protein, 20 aa, Artificial Sequence
  Description of Artificial Sequence: targeting sequence/synthetic sequence
STMGASMTLTVQARLLLSGI

SEQ ID NO: 11857 - protein, 20 aa, Artificial Sequence
  Description of Artificial Sequence: targeting sequence/synthetic sequence
KLSSTSQLKSVGLNLEGNGV

SEQ ID NO: 11858 - protein, 20 aa, Artificial Sequence
  Description of Artificial Sequence: targeting sequence/synthetic sequence
YRPGTVALREIRRYQKSTEL

SEQ ID NO: 11859 - protein, 20 aa, Artificial Sequence
  Description of Artificial Sequence: targeting sequence/synthetic sequence
ASGEGKPKAKKAGAAKPRKP

SEQ ID NO: 11860 - protein, 20 aa, Artificial Sequence
  Description of Artificial Sequence: targeting sequence/synthetic sequence
TGPYGAPAGPLIVPYNLPLP

SEQ ID NO: 11861 - protein, 20 aa, Artificial Sequence
  Description of Artificial Sequence: targeting sequence/synthetic sequence
PYGAPAGPLIVPYNLPLPGG

SEQ ID NO: 11862 - protein, 20 aa, Artificial Sequence
  Description of Artificial Sequence: targeting sequence/synthetic sequence
HLWFYSRLKSMAQEEIRREM

SEQ ID NO: 11863 - protein, 20 aa, Artificial Sequence
  Description of Artificial Sequence: targeting sequence/synthetic sequence
AVLEYLTAEILELAGNAARD

SEQ ID NO: 11864 - protein, 20 aa, Artificial Sequence
  Description of Artificial Sequence: targeting sequence/synthetic sequence
KLTEDRWNKPQKTKGHKGSH

SEQ ID NO: 11865 - protein, 20 aa, Artificial Sequence
  Description of Artificial Sequence: targeting sequence/synthetic sequence
IQVSRRRSLGVRRPLQEHVR

SEQ ID NO: 11866 - protein, 20 aa, Artificial Sequence
  Description of Artificial Sequence: targeting sequence/synthetic sequence
RKSTGGKAPRKQLATKAARK

SEQ ID NO: 11867 - protein, 20 aa, Artificial Sequence
  Description of Artificial Sequence: targeting sequence/synthetic sequence
PKSRELRVNRGLDTGRRRAA

SEQ ID NO: 11868 - protein, 20 aa, Artificial Sequence
  Description of Artificial Sequence: targeting sequence/synthetic sequence
TKLTEDRWNERQKTQGHRGN

SEQ ID NO: 11869 - protein, 20 aa, Artificial Sequence
  Description of Artificial Sequence: targeting sequence/synthetic sequence
VIKQGDSWLKKFTEACNAAK

SEQ ID NO: 11870 - protein, 20 aa, Artificial Sequence
  Description of Artificial Sequence: targeting sequence/synthetic sequence
QVSRRRSLGVRRPLQEHVRF

SEQ ID NO: 11871 - protein, 20 aa, Artificial Sequence
  Description of Artificial Sequence: targeting sequence/synthetic sequence
GSTMGAAAITLTAQARQLLS

SEQ ID NO: 11872 - protein, 20 aa, Artificial Sequence
  Description of Artificial Sequence: targeting sequence/synthetic sequence
SDRGWGNGCGLFGKGSMETC

SEQ ID NO: 11873 - protein, 20 aa, Artificial Sequence
  Description of Artificial Sequence: targeting sequence/synthetic sequence
GLFEDTNLCAIHAKRVTIMP

SEQ ID NO: 11874 - protein, 20 aa, Artificial Sequence
  Description of Artificial Sequence: targeting sequence/synthetic sequence
WGNGCGLFGKGSMETCAKFS

SEQ ID NO: 11875 - protein, 20 aa, Artificial Sequence
  Description of Artificial Sequence: targeting sequence/synthetic sequence
LPEEHQASTVCRRDQSDRGW

SEQ ID NO: 11876 - protein, 20 aa, Artificial Sequence
  Description of Artificial Sequence: targeting sequence/synthetic sequence
PATLPEEHQASTVCRRDQSD

SEQ ID NO: 11877 - protein, 20 aa, Artificial Sequence
  Description of Artificial Sequence: targeting sequence/synthetic sequence
KTDLRFQSSAVMALQEACEA

SEQ ID NO: 11878 - protein, 20 aa, Artificial Sequence
  Description of Artificial Sequence: targeting sequence/synthetic sequence
GRVHRLLRKGNYSERVGAGA

SEQ ID NO: 11879 - protein, 20 aa, Artificial Sequence
  Description of Artificial Sequence: targeting sequence/synthetic sequence
RVHRLLRKGNYAERVGAGAP

SEQ ID NO: 11880 - protein, 20 aa, Artificial Sequence
  Description of Artificial Sequence: targeting sequence/synthetic sequence
RKQLATKAARKSAPATGGVK

SEQ ID NO: 11881 - protein, 20 aa, Artificial Sequence
  Description of Artificial Sequence: targeting sequence/synthetic sequence
KQSASWLKKFNDMANAAKGL

SEQ ID NO: 11882 - protein, 20 aa, Artificial Sequence
  Description of Artificial Sequence: targeting sequence/synthetic sequence
RELRVNRGLDTGRRRAAPEA

SEQ ID NO: 11883 - protein, 20 aa, Artificial Sequence
  Description of Artificial Sequence: targeting sequence/synthetic sequence
MRQGDSWLKKFTEACNAAKG

SEQ ID NO: 11884 - protein, 20 aa, Artificial Sequence
  Description of Artificial Sequence: targeting sequence/synthetic sequence
KQLATKAARKSAPATGGVKK

SEQ ID NO: 11885 - protein, 20 aa, Artificial Sequence
  Description of Artificial Sequence: targeting sequence/synthetic sequence
RPGGKKKYKLKHIVWASREL

SEQ ID NO: 11886 - protein, 20 aa, Artificial Sequence
  Description of Artificial Sequence: targeting sequence/synthetic sequence
RPGGKKKYRLKHIVWAANEL

SEQ ID NO: 11887 - protein, 20 aa, Artificial Sequence
  Description of Artificial Sequence: targeting sequence/synthetic sequence
LAAVLEYLTAEILELAGNAA

SEQ ID NO: 11888 - protein, 20 aa, Artificial Sequence
  Description of Artificial Sequence: targeting sequence/synthetic sequence
VGIIAGLVLLGSVVSGAVVA

SEQ ID NO: 11889 - protein, 20 aa, Artificial Sequence
  Description of Artificial Sequence: targeting sequence/synthetic sequence
IAGLVLLGAVITGAVVAAVM

SEQ ID NO: 11890 - protein, 20 aa, Artificial Sequence
  Description of Artificial Sequence: targeting sequence/synthetic sequence
RPGGKKKYRLKHIVWAANKL

SEQ ID NO: 11891 - protein, 20 aa, Artificial Sequence
  Description of Artificial Sequence: targeting sequence/synthetic sequence
IASIHDSNPTQEKREQLFNN

SEQ ID NO: 11892 - protein, 20 aa, Artificial Sequence
  Description of Artificial Sequence: targeting sequence/synthetic sequence
GMEWIAVKIQKFIDWLKVKI

SEQ ID NO: 11893 - protein, 20 aa, Artificial Sequence
  Description of Artificial Sequence: targeting sequence/synthetic sequence
KKAVTKAQKKDGKKRKRSRK

SEQ ID NO: 11894 - protein, 20 aa, Artificial Sequence
  Description of Artificial Sequence: targeting sequence/synthetic sequence
FGFLGAAGSTMGAASITLTV

SEQ ID NO: 11895 - protein, 20 aa, Artificial Sequence
  Description of Artificial Sequence: targeting sequence/synthetic sequence
RITPRHLQLAIRGDEELDSL

SEQ ID NO: 11896 - protein, 20 aa, Artificial Sequence
  Description of Artificial Sequence: targeting sequence/synthetic sequence
RVNLVQTEEQYVFVHDAILE

SEQ ID NO: 11897 - protein, 20 aa, Artificial Sequence
  Description of Artificial Sequence: targeting sequence/synthetic sequence
NLTTGATLINEQWLLTTAKN

SEQ ID NO: 11898 - protein, 20 aa, Artificial Sequence
  Description of Artificial Sequence: targeting sequence/synthetic sequence
VGYTEIDGKHFYFAENGEMQ

SEQ ID NO: 11899 - protein, 20 aa, Artificial Sequence
  Description of Artificial Sequence: targeting sequence/synthetic sequence
ITFHGAKEIALGYSAGALAS

SEQ ID NO: 11900 - protein, 20 aa, Artificial Sequence
  Description of Artificial Sequence: targeting sequence/synthetic sequence
KVGSREAAFTYAIIAAGVAH

SEQ ID NO: 11901 - protein, 20 aa, Artificial Sequence
  Description of Artificial Sequence: targeting sequence/synthetic sequence
ESSKRDKSKKKKKVKVKMEK

SEQ ID NO: 11902 - protein, 20 aa, Artificial Sequence
  Description of Artificial Sequence: targeting sequence/synthetic sequence
ASVVTELRCQCLQTLQGIHL

SEQ ID NO: 11903 - protein, 20 aa, Artificial Sequence
  Description of Artificial Sequence: targeting sequence/synthetic sequence
PFQRLVREIAQDFKTDLRFQ

SEQ ID NO: 11904 - protein, 20 aa, Artificial Sequence
  Description of Artificial Sequence: targeting sequence/synthetic sequence
HSIIRRSLPATLPQCQAANK

SEQ ID NO: 11905 - protein, 20 aa, Artificial Sequence
  Description of Artificial Sequence: targeting sequence/synthetic sequence
GATLINEQWLLTTAKNLFLN

SEQ ID NO: 11906 - protein, 20 aa, Artificial Sequence
  Description of Artificial Sequence: targeting sequence/synthetic sequence
DKFRIFCKALNPKEIEKLYT

SEQ ID NO: 11907 - protein, 20 aa, Artificial Sequence
  Description of Artificial Sequence: targeting sequence/synthetic sequence
FLGFLGAAGSTMGAGSLTLT

SEQ ID NO: 11908 - protein, 20 aa, Artificial Sequence
  Description of Artificial Sequence: targeting sequence/synthetic sequence
GSKKAVTKAQKKDGKKRKRS

SEQ ID NO: 11909 - protein, 20 aa, Artificial Sequence
  Description of Artificial Sequence: targeting sequence/synthetic sequence
VKRITPRHLQLAIRGDEELD

SEQ ID NO: 11910 - protein, 20 aa, Artificial Sequence
  Description of Artificial Sequence: targeting sequence/synthetic sequence
ATGAATPKKSAKKTPKKAKK

SEQ ID NO: 11911 - protein, 20 aa, Artificial Sequence
  Description of Artificial Sequence: targeting sequence/synthetic sequence
AIRNDEELNKLLGKVTIAQG

SEQ ID NO: 11912 - protein, 20 aa, Artificial Sequence
  Description of Artificial Sequence: targeting sequence/synthetic sequence
KMSTPVEVLCKGFPAEFAMY

SEQ ID NO: 11913 - protein, 20 aa, Artificial Sequence
  Description of Artificial Sequence: targeting sequence/synthetic sequence
KREITFHGAKEIALSYSAGA

SEQ ID NO: 11914 - protein, 20 aa, Artificial Sequence
  Description of Artificial Sequence: targeting sequence/synthetic sequence
YGIDVTIRNAYDKTALDIAI

SEQ ID NO: 11915 - protein, 20 aa, Artificial Sequence
  Description of Artificial Sequence: targeting sequence/synthetic sequence
AKGLEWIFNKISKFIDWLKE

SEQ ID NO: 11916 - protein, 20 aa, Artificial Sequence
  Description of Artificial Sequence: targeting sequence/synthetic sequence
QKKDGKKRKRSRKESYSVYV

SEQ ID NO: 11917 - protein, 20 aa, Artificial Sequence
  Description of Artificial Sequence: targeting sequence/synthetic sequence
AGNAARDNKKTRIIPRHLQL

SEQ ID NO: 11918 - protein, 20 aa, Artificial Sequence
  Description of Artificial Sequence: targeting sequence/synthetic sequence
VDILYYRKDASSFRCLVDVV

SEQ ID NO: 11919 - protein, 20 aa, Artificial Sequence
  Description of Artificial Sequence: targeting sequence/synthetic sequence
AKKPAGATPKKAKKAAGAKK

SEQ ID NO: 11920 - protein, 20 aa, Artificial Sequence
  Description of Artificial Sequence: targeting sequence/synthetic sequence
GRKAKEDSGNKPMSKKEMIA

SEQ ID NO: 11921 - protein, 20 aa, Artificial Sequence
  Description of Artificial Sequence: targeting sequence/synthetic sequence
VTKAQKKDGKKRKRSRKESY

SEQ ID NO: 11922 - protein, 20 aa, Artificial Sequence
  Description of Artificial Sequence: targeting sequence/synthetic sequence
ELAGNAARDNKKARIAPRHI

SEQ ID NO: 11923 - protein, 20 aa, Artificial Sequence
  Description of Artificial Sequence: targeting sequence/synthetic sequence
GETGPAGRPGEVGPPGPPGP

SEQ ID NO: 11924 - protein, 20 aa, Artificial Sequence
  Description of Artificial Sequence: targeting sequence/synthetic sequence
GAGGYPGASYPGAYPGQAPP

SEQ ID NO: 11925 - protein, 20 aa, Artificial Sequence
  Description of Artificial Sequence: targeting sequence/synthetic sequence
SCKGMEWISIKIQKFIEWLK

SEQ ID NO: 11926 - protein, 20 aa, Artificial Sequence
  Description of Artificial Sequence: targeting sequence/synthetic sequence
PGSQGESGRPGPPGPSGPRG

SEQ ID NO: 11927 - protein, 20 aa, Artificial Sequence
  Description of Artificial Sequence: targeting sequence/synthetic sequence
GRGESSKRDKSKKKKKVKVK

SEQ ID NO: 11928 - protein, 20 aa, Artificial Sequence
  Description of Artificial Sequence: targeting sequence/synthetic sequence
PGKDGVRGLTGPIGPPGPAG

SEQ ID NO: 11929 - protein, 20 aa, Artificial Sequence
  Description of Artificial Sequence: targeting sequence/synthetic sequence
KPRNVPAAYRGVGDDQLGEE

SEQ ID NO: 11930 - protein, 20 aa, Artificial Sequence
  Description of Artificial Sequence: targeting sequence/synthetic sequence
DDWALEIAQRNRAINPFVEY

SEQ ID NO: 11931 - protein, 20 aa, Artificial Sequence
  Description of Artificial Sequence: targeting sequence/synthetic sequence
APLATELRCQCLQTLQGIHL

SEQ ID NO: 11932 - protein, 20 aa, Artificial Sequence
  Description of Artificial Sequence: targeting sequence/synthetic sequence
NEDCELRILDFGLARQADEE

SEQ ID NO: 11933 - protein, 20 aa, Artificial Sequence
  Description of Artificial Sequence: targeting sequence/synthetic sequence
GNAARDNKKTRIIPRHLQLA

SEQ ID NO: 11934 - protein, 20 aa, Artificial Sequence
  Description of Artificial Sequence: targeting sequence/synthetic sequence
LPVDDWALEIAQRNRAINPF

SEQ ID NO: 11935 - protein, 20 aa, Artificial Sequence
  Description of Artificial Sequence: targeting sequence/synthetic sequence
YVSIDKFRIFCKALNPKEIE

SEQ ID NO: 11936 - protein, 20 aa, Artificial Sequence
  Description of Artificial Sequence: targeting sequence/synthetic sequence
KDEFQTLNIVTPRVRPEDCS

SEQ ID NO: 11937 - protein, 20 aa, Artificial Sequence
  Description of Artificial Sequence: targeting sequence/synthetic sequence
IGSRETAFTHAVSAAGVVNA

SEQ ID NO: 11938 - protein, 20 aa, Artificial Sequence
  Description of Artificial Sequence: targeting sequence/synthetic sequence
PKKGSKKAVTKAQKKDGKKR

SEQ ID NO: 11939 - protein, 20 aa, Artificial Sequence
  Description of Artificial Sequence: targeting sequence/synthetic sequence
QIASIHDSNPTQEKREQLFN

SEQ ID NO: 11940 - protein, 20 aa, Artificial Sequence
  Description of Artificial Sequence: targeting sequence/synthetic sequence
VILAENGFLPGNLVGIRLNW

SEQ ID NO: 11941 - protein, 20 aa, Artificial Sequence
  Description of Artificial Sequence: targeting sequence/synthetic sequence
GLEWIGQKISKFIDWIKSML

SEQ ID NO: 11942 - protein, 20 aa, Artificial Sequence
  Description of Artificial Sequence: targeting sequence/synthetic sequence
KPHRYRPGTVALREIRRYQK

SEQ ID NO: 11943 - protein, 20 aa, Artificial Sequence
  Description of Artificial Sequence: targeting sequence/synthetic sequence
LQLAIRNDEELNKLLGKVTI

SEQ ID NO: 11944 - protein, 20 aa, Artificial Sequence
  Description of Artificial Sequence: targeting sequence/synthetic sequence
LVQTEEQYVFVHDAILEACL

SEQ ID NO: 11945 - protein, 20 aa, Artificial Sequence
  Description of Artificial Sequence: targeting sequence/synthetic sequence
KTPAQFDADELRAAMKGLGT

SEQ ID NO: 11946 - protein, 20 aa, Artificial Sequence
  Description of Artificial Sequence: targeting sequence/synthetic sequence
PFQRLVREIAQDFNTDLRFQ

SEQ ID NO: 11947 - protein, 20 aa, Artificial Sequence
  Description of Artificial Sequence: targeting sequence/synthetic sequence
DEFQTLNIVTPRVRPEDCSI

SEQ ID NO: 11948 - protein, 20 aa, Artificial Sequence
  Description of Artificial Sequence: targeting sequence/synthetic sequence
GPRGLPGPPGAPGPQGFQGP

SEQ ID NO: 11949 - protein, 20 aa, Artificial Sequence
  Description of Artificial Sequence: targeting sequence/synthetic sequence
EGRKAKEDSGNKPMSKKEMI

SEQ ID NO: 11950 - protein, 20 aa, Artificial Sequence
  Description of Artificial Sequence: targeting sequence/synthetic sequence
PGIKGPAGIPGFPGMKGHRG

SEQ ID NO: 11951 - protein, 20 aa, Artificial Sequence
  Description of Artificial Sequence: targeting sequence/synthetic sequence
ALANLLLVGALTDNSAKAES

SEQ ID NO: 11952 - protein, 20 aa, Artificial Sequence
  Description of Artificial Sequence: targeting sequence/synthetic sequence
GVMKVGYTEIDGKHFYFAEN

SEQ ID NO: 11953 - protein, 20 aa, Artificial Sequence
  Description of Artificial Sequence: targeting sequence/synthetic sequence
RSKPRNVPAAYRGVGDDQLG

SEQ ID NO: 11954 - protein, 20 aa, Artificial Sequence
  Description of Artificial Sequence: targeting sequence/synthetic sequence
KYGIDVTIRNAYDKTALDIA

SEQ ID NO: 11955 - protein, 20 aa, Artificial Sequence
  Description of Artificial Sequence: targeting sequence/synthetic sequence
KGAAGPPGPPGAAGTPGLQG

SEQ ID NO: 11956 - protein, 20 aa, Artificial Sequence
  Description of Artificial Sequence: targeting sequence/synthetic sequence
ANLLLVGALTDNSAKAESKK

SEQ ID NO: 11957 - protein, 20 aa, Artificial Sequence
  Description of Artificial Sequence: targeting sequence/synthetic sequence
TPVEVLCKGFPAEFAMYLNY

SEQ ID NO: 11958 - protein, 20 aa, Artificial Sequence
  Description of Artificial Sequence: targeting sequence/synthetic sequence
SKSTSGGTAALGCLVKDYFP

SEQ ID NO: 11959 - protein, 20 aa, Artificial Sequence
  Description of Artificial Sequence: targeting sequence/synthetic sequence
LKKQLPGVKSEGKRKGDEVD

SEQ ID NO: 11960 - protein, 20 aa, Artificial Sequence
  Description of Artificial Sequence: targeting sequence/synthetic sequence
PAGAGGYPGASYPGAYPGQA

SEQ ID NO: 11961 - protein, 20 aa, Artificial Sequence
  Description of Artificial Sequence: targeting sequence/synthetic sequence
FVILAENGFRPVDLLGIRLH

SEQ ID NO: 11962 - protein, 20 aa, Artificial Sequence
  Description of Artificial Sequence: targeting sequence/synthetic sequence
APRTNFNNAAINYQNLYLGL

SEQ ID NO: 11963 - protein, 20 aa, Artificial Sequence
  Description of Artificial Sequence: targeting sequence/synthetic sequence
PEDFLEEDEYHATTETVISM

SEQ ID NO: 11964 - protein, 20 aa, Artificial Sequence
  Description of Artificial Sequence: targeting sequence/synthetic sequence
RRSLPATLPQCQAANKTCPT

SEQ ID NO: 11965 - protein, 20 aa, Artificial Sequence
  Description of Artificial Sequence: targeting sequence/synthetic sequence
KVDILYYRKDASSFRCLVDV

SEQ ID NO: 11966 - protein, 20 aa, Artificial Sequence
  Description of Artificial Sequence: targeting sequence/synthetic sequence
INSEGRRELLDHSGEWINKE

SEQ ID NO: 11967 - protein, 20 aa, Artificial Sequence
  Description of Artificial Sequence: targeting sequence/synthetic sequence
KKGSKKAVTKAQKKDGKKRK

SEQ ID NO: 11968 - protein, 20 aa, Artificial Sequence
  Description of Artificial Sequence: targeting sequence/synthetic sequence
AQFDADELRAAMKGLGTDED

SEQ ID NO: 11969 - protein, 20 aa, Artificial Sequence
  Description of Artificial Sequence: targeting sequence/synthetic sequence
AGAPLATELRCQCLQTLQGI

SEQ ID NO: 11970 - protein, 20 aa, Artificial Sequence
  Description of Artificial Sequence: targeting sequence/synthetic sequence
NSEGRKELLAHSGKWINKEE

SEQ ID NO: 11971 - protein, 20 aa, Artificial Sequence
  Description of Artificial Sequence: targeting sequence/synthetic sequence
KKQLPGVKSEGKRKGDEVDG

SEQ ID NO: 11972 - protein, 20 aa, Artificial Sequence
  Description of Artificial Sequence: targeting sequence/synthetic sequence
GERGSEGSPGHPGQPGPPGP

SEQ ID NO: 11973 - protein, 20 aa, Artificial Sequence
  Description of Artificial Sequence: targeting sequence/synthetic sequence
VAVNEDCELRILDFGLARQA

SEQ ID NO: 11974 - protein, 20 aa, Artificial Sequence
  Description of Artificial Sequence: targeting sequence/synthetic sequence
SDGSLEDDDYHATTETIITM

SEQ ID NO: 11975 - protein, 20 aa, Artificial Sequence
  Description of Artificial Sequence: targeting sequence/synthetic sequence
TNFNNAAINYQNLYLGLRFI

SEQ ID NO: 11976 - protein, 20 aa, Artificial Sequence
  Description of Artificial Sequence: targeting sequence/synthetic sequence
GGAPRANLTVVLLRGEKELK

SEQ ID NO: 11977 - protein, 20 aa, Artificial Sequence
  Description of Artificial Sequence: targeting sequence/synthetic sequence
CQVEGGAPRANLTVVLLRGE

SEQ ID NO: 11978 - protein, 20 aa, Artificial Sequence
  Description of Artificial Sequence: targeting sequence/synthetic sequence
VRKLTEDRWNKPQKTKGHRG

SEQ ID NO: 11979 - protein, 20 aa, Artificial Sequence
  Description of Artificial Sequence: targeting sequence/synthetic sequence
GAASITLTAQVRQLLSGIVQ

SEQ ID NO: 11980 - protein, 20 aa, Artificial Sequence
  Description of Artificial Sequence: targeting sequence/synthetic sequence
TTPRRIKPPFPSVTKLTEDR

SEQ ID NO: 11981 - protein, 20 aa, Artificial Sequence
  Description of Artificial Sequence: targeting sequence/synthetic sequence
HMSEEGNEEWECKRSYSDRG

SEQ ID NO: 11982 - protein, 20 aa, Artificial Sequence
  Description of Artificial Sequence: targeting sequence/synthetic sequence
IKPPLPSVRKLVEDRWNKPQ

SEQ ID NO: 11983 - protein, 20 aa, Artificial Sequence
  Description of Artificial Sequence: targeting sequence/synthetic sequence
RIVQRIKDFLRNLVPRTESC

SEQ ID NO: 11984 - protein, 20 aa, Artificial Sequence
  Description of Artificial Sequence: targeting sequence/synthetic sequence
NKRSTITSREIQTAVRLLLP

SEQ ID NO: 11985 - protein, 20 aa, Artificial Sequence
  Description of Artificial Sequence: targeting sequence/synthetic sequence
SGLIYEETRGVLKVFLENVI

SEQ ID NO: 11986 - protein, 20 aa, Artificial Sequence
  Description of Artificial Sequence: targeting sequence/synthetic sequence
KLLLKLWKKLLKLLKGGGRR

SEQ ID NO: 11987 - protein, 20 aa, Artificial Sequence
  Description of Artificial Sequence: targeting sequence/synthetic sequence
APKKGSKKAVTKAQKKDGKK

SEQ ID NO: 11988 - protein, 20 aa, Artificial Sequence
  Description of Artificial Sequence: targeting sequence/synthetic sequence
PEVQFNWYVDGVEVHNAKTK

SEQ ID NO: 11989 - protein, 20 aa, Artificial Sequence
  Description of Artificial Sequence: targeting sequence/synthetic sequence
EMKRRRDFYAAYPLTEVPNG

SEQ ID NO: 11990 - protein, 20 aa, Artificial Sequence
  Description of Artificial Sequence: targeting sequence/synthetic sequence
EGNEEWECKRSYSDRGWGNG

SEQ ID NO: 11991 - protein, 20 aa, Artificial Sequence
  Description of Artificial Sequence: targeting sequence/synthetic sequence
AGEKGSPGADGPAGAPGTPG

SEQ ID NO: 11992 - protein, 20 aa, Artificial Sequence
  Description of Artificial Sequence: targeting sequence/synthetic sequence
DWGAEACTCSPSHPQDAFCN

SEQ ID NO: 11993 - protein, 20 aa, Artificial Sequence
  Description of Artificial Sequence: targeting sequence/synthetic sequence
RLNSVTAADTAVYYCAHGSS

SEQ ID NO: 11994 - protein, 20 aa, Artificial Sequence
  Description of Artificial Sequence: targeting sequence/synthetic sequence
TTDLKYNPARVEAFHRYGTT

SEQ ID NO: 11995 - protein, 20 aa, Artificial Sequence
  Description of Artificial Sequence: targeting sequence/synthetic sequence
GGGVVQPGSSLRLSCAASGF

SEQ ID NO: 11996 - protein, 20 aa, Artificial Sequence
  Description of Artificial Sequence: targeting sequence/synthetic sequence
VRMVPVLLSLLLLLGPAVPQ

SEQ ID NO: 11997 - protein, 20 aa, Artificial Sequence
  Description of Artificial Sequence: targeting sequence/synthetic sequence
KAVTKAQKKDGKKRKRSRKE

SEQ ID NO: 11998 - protein, 20 aa, Artificial Sequence
  Description of Artificial Sequence: targeting sequence/synthetic sequence
IELAARRRRSLPGLASSVKE

SEQ ID NO: 11999 - protein, 20 aa, Artificial Sequence
  Description of Artificial Sequence: targeting sequence/synthetic sequence
CGAVLIHPSWVLTAAHCMDE

SEQ ID NO: 12000 - protein, 20 aa, Artificial Sequence
  Description of Artificial Sequence: targeting sequence/synthetic sequence
RQMTTTTNPLIRHENRMVLA

SEQ ID NO: 12001 - protein, 20 aa, Artificial Sequence
  Description of Artificial Sequence: targeting sequence/synthetic sequence
LFLVFLGIYVVTVLGNLGMI

SEQ ID NO: 12002 - protein, 20 aa, Artificial Sequence
  Description of Artificial Sequence: targeting sequence/synthetic sequence
GALAAALSPMEIYGLVQQSH

SEQ ID NO: 12003 - protein, 20 aa, Artificial Sequence
  Description of Artificial Sequence: targeting sequence/synthetic sequence
GYSNFVSSDLDCTYISLKPG

SEQ ID NO: 12004 - protein, 20 aa, Artificial Sequence
  Description of Artificial Sequence: targeting sequence/synthetic sequence
LVMAGTASTGRRKRRRRRKP

SEQ ID NO: 12005 - protein, 20 aa, Artificial Sequence
  Description of Artificial Sequence: targeting sequence/synthetic sequence
HEEFGGGGGYGRRRRRRGGG

SEQ ID NO: 12006 - protein, 20 aa, Artificial Sequence
  Description of Artificial Sequence: targeting sequence/synthetic sequence
QVKGTGANGSFKLNRKKLEG

SEQ ID NO: 12007 - protein, 20 aa, Artificial Sequence
  Description of Artificial Sequence: targeting sequence/synthetic sequence
APTKTRRRVVEREKRAVGMG

SEQ ID NO: 12008 - protein, 20 aa, Artificial Sequence
  Description of Artificial Sequence: targeting sequence/synthetic sequence
AAGALAAALSPMEIYGLVQQ

SEQ ID NO: 12009 - protein, 20 aa, Artificial Sequence
  Description of Artificial Sequence: targeting sequence/synthetic sequence
PMAERQNDSWLKKFTEMTNA

SEQ ID NO: 12010 - protein, 20 aa, Artificial Sequence
  Description of Artificial Sequence: targeting sequence/synthetic sequence
GGKLDSWEKIRLRPGGRKKY

SEQ ID NO: 12011 - protein, 20 aa, Artificial Sequence
  Description of Artificial Sequence: targeting sequence/synthetic sequence
AAKFVIHCHIPQWGSDKCEE

SEQ ID NO: 12012 - protein, 20 aa, Artificial Sequence
  Description of Artificial Sequence: targeting sequence/synthetic sequence
KGSKKAVTKAQKKDGKKRKR

SEQ ID NO: 12013 - protein, 20 aa, Artificial Sequence
  Description of Artificial Sequence: targeting sequence/synthetic sequence
GERGFPGERGVQGPPGPAGP

SEQ ID NO: 12014 - protein, 20 aa, Artificial Sequence
  Description of Artificial Sequence: targeting sequence/synthetic sequence
RRPPLPSVTKLTEDRWNERQ

SEQ ID NO: 12015 - protein, 20 aa, Artificial Sequence
  Description of Artificial Sequence: targeting sequence/synthetic sequence
RASVLSGGELDRWEKIRLRP

SEQ ID NO: 12016 - protein, 20 aa, Artificial Sequence
  Description of Artificial Sequence: targeting sequence/synthetic sequence
SCSVMHEALHNHYTQKSLSL

SEQ ID NO: 12017 - protein, 20 aa, Artificial Sequence
  Description of Artificial Sequence: targeting sequence/synthetic sequence
AVGRVADTIASGPVNTEQIP

SEQ ID NO: 12018 - protein, 20 aa, Artificial Sequence
  Description of Artificial Sequence: targeting sequence/synthetic sequence
IVIGEGSQMGLDECQFQFRN

SEQ ID NO: 12019 - protein, 20 aa, Artificial Sequence
  Description of Artificial Sequence: targeting sequence/synthetic sequence
VLLVLGFEVQGTQQPQQDEM

SEQ ID NO: 12020 - protein, 20 aa, Artificial Sequence
  Description of Artificial Sequence: targeting sequence/synthetic sequence
KRIVQRIKDFLRNLVPRTES

SEQ ID NO: 12021 - protein, 20 aa, Artificial Sequence
  Description of Artificial Sequence: targeting sequence/synthetic sequence
LDKWEKIRLRPGGKKQYRLK

SEQ ID NO: 12022 - protein, 20 aa, Artificial Sequence
  Description of Artificial Sequence: targeting sequence/synthetic sequence
RGKKADELEKIRLRPSGKKK

SEQ ID NO: 12023 - protein, 20 aa, Artificial Sequence
  Description of Artificial Sequence: targeting sequence/synthetic sequence
GSEELKSLFNTVAVLYYVHQ

SEQ ID NO: 12024 - protein, 20 aa, Artificial Sequence
  Description of Artificial Sequence: targeting sequence/synthetic sequence
KSTGGKAPRKQLATKAARKS

SEQ ID NO: 12025 - protein, 20 aa, Artificial Sequence
  Description of Artificial Sequence: targeting sequence/synthetic sequence
KLLSISGKRSAPGGGSKVPQ

SEQ ID NO: 12026 - protein, 20 aa, Artificial Sequence
  Description of Artificial Sequence: targeting sequence/synthetic sequence
GSENLKSLFNTVCVIYCLHA

SEQ ID NO: 12027 - protein, 20 aa, Artificial Sequence
  Description of Artificial Sequence: targeting sequence/synthetic sequence
MVPVLLSLLLLLGPAVPQEN

SEQ ID NO: 12028 - protein, 20 aa, Artificial Sequence
  Description of Artificial Sequence: targeting sequence/synthetic sequence
GERGAAGLPGPKGDRGDAGP

SEQ ID NO: 12029 - protein, 20 aa, Artificial Sequence
  Description of Artificial Sequence: targeting sequence/synthetic sequence
LVQKIELAARRRRSLPGLAS

SEQ ID NO: 12030 - protein, 20 aa, Artificial Sequence
  Description of Artificial Sequence: targeting sequence/synthetic sequence
LSISGKRSAPGGGSKVPQKK

SEQ ID NO: 12031 - protein, 20 aa, Artificial Sequence
  Description of Artificial Sequence: targeting sequence/synthetic sequence
PTKAKRRVVQREKRAVGMLG

SEQ ID NO: 12032 - protein, 20 aa, Artificial Sequence
  Description of Artificial Sequence: targeting sequence/synthetic sequence
GGEAGITRSVVATTRARVCR

SEQ ID NO: 12033 - protein, 20 aa, Artificial Sequence
  Description of Artificial Sequence: targeting sequence/synthetic sequence
GKGGAKRHRKVLRDNIQGIT

SEQ ID NO: 12034 - protein, 20 aa, Artificial Sequence
  Description of Artificial Sequence: targeting sequence/synthetic sequence
SRSKERSKKRRKKKSSKRKH

SEQ ID NO: 12035 - protein, 20 aa, Artificial Sequence
  Description of Artificial Sequence: targeting sequence/synthetic sequence
RREEEGIQLRKQKREQQLFK

SEQ ID NO: 12036 - protein, 20 aa, Artificial Sequence
  Description of Artificial Sequence: targeting sequence/synthetic sequence
SHRQMETTTNPLIRHENRMV

SEQ ID NO: 12037 - protein, 20 aa, Artificial Sequence
  Description of Artificial Sequence: targeting sequence/synthetic sequence
DSDGQDLLFTNQLKEHPTDF

SEQ ID NO: 12038 - protein, 20 aa, Artificial Sequence
  Description of Artificial Sequence: targeting sequence/synthetic sequence
REIRRYQKSTELLIRKLPFQ

SEQ ID NO: 12039 - protein, 20 aa, Artificial Sequence
  Description of Artificial Sequence: targeting sequence/synthetic sequence
KLLKLLLKLWKKLLKLLKGG

SEQ ID NO: 12040 - protein, 20 aa, Artificial Sequence
  Description of Artificial Sequence: targeting sequence/synthetic sequence
GLVMAGTASTGRRKRRRRRK

SEQ ID NO: 12041 - protein, 20 aa, Artificial Sequence
  Description of Artificial Sequence: targeting sequence/synthetic sequence
TMGATSMTLTVQARLLLSGI

SEQ ID NO: 12042 - protein, 20 aa, Artificial Sequence
  Description of Artificial Sequence: targeting sequence/synthetic sequence
LEYDHPLKKLTEEFGPHTKA

SEQ ID NO: 12043 - protein, 20 aa, Artificial Sequence
  Description of Artificial Sequence: targeting sequence/synthetic sequence
GWHTTDLKYNPARVEAFHRY

SEQ ID NO: 12044 - protein, 20 aa, Artificial Sequence
  Description of Artificial Sequence: targeting sequence/synthetic sequence
FRFDVAWFLTETSPFMWSNL

SEQ ID NO: 12045 - protein, 20 aa, Artificial Sequence
  Description of Artificial Sequence: targeting sequence/synthetic sequence
GEAGITRSVVATTRARVCRR

SEQ ID NO: 12046 - protein, 20 aa, Artificial Sequence
  Description of Artificial Sequence: targeting sequence/synthetic sequence
ACGAVLIHPSWVLTAAHCMD

SEQ ID NO: 12047 - protein, 20 aa, Artificial Sequence
  Description of Artificial Sequence: targeting sequence/synthetic sequence
GFRFDVAWFLTETSPFMWSN

SEQ ID NO: 12048 - protein, 20 aa, Artificial Sequence
  Description of Artificial Sequence: targeting sequence/synthetic sequence
GSEERKSLYNTVATLYCVHQ

SEQ ID NO: 12049 - protein, 20 aa, Artificial Sequence
  Description of Artificial Sequence: targeting sequence/synthetic sequence
GGLVQPGGSLRLSCAASGFI

SEQ ID NO: 12050 - protein, 20 aa, Artificial Sequence
  Description of Artificial Sequence: targeting sequence/synthetic sequence
MRRRREEEGLQLRKQKREEQ

SEQ ID NO: 12051 - protein, 20 aa, Artificial Sequence
  Description of Artificial Sequence: targeting sequence/synthetic sequence
KGTGASGSFKLNKKASSVET

SEQ ID NO: 12052 - protein, 20 aa, Artificial Sequence
  Description of Artificial Sequence: targeting sequence/synthetic sequence
PGPKGDRGDAGPKGADGSPG

SEQ ID NO: 12053 - protein, 20 aa, Artificial Sequence
  Description of Artificial Sequence: targeting sequence/synthetic sequence
VQFNWYVDGVEVHNAKTKPR

SEQ ID NO: 12054 - protein, 20 aa, Artificial Sequence
  Description of Artificial Sequence: targeting sequence/synthetic sequence
VKIQKFIEWLKVKNLPEVKE

SEQ ID NO: 12055 - protein, 20 aa, Artificial Sequence
  Description of Artificial Sequence: targeting sequence/synthetic sequence
KFVIHCNSPVWGADKCEELL

SEQ ID NO: 12056 - protein, 20 aa, Artificial Sequence
  Description of Artificial Sequence: targeting sequence/synthetic sequence
GLTGPIGPPGPAGAPGDKGE

SEQ ID NO: 12057 - protein, 20 aa, Artificial Sequence
  Description of Artificial Sequence: targeting sequence/synthetic sequence
LGDWGAEACTCSPSHPQDAF

SEQ ID NO: 12058 - protein, 20 aa, Artificial Sequence
  Description of Artificial Sequence: targeting sequence/synthetic sequence
RSHRQMVATTNPLIRHENRM

SEQ ID NO: 12059 - protein, 20 aa, Artificial Sequence
  Description of Artificial Sequence: targeting sequence/synthetic sequence
NFVSSDLDCTYISLKPGSYK

SEQ ID NO: 12060 - protein, 20 aa, Artificial Sequence
  Description of Artificial Sequence: targeting sequence/synthetic sequence
ACTCSPSHPQDAFCNSDIVI

SEQ ID NO: 12061 - protein, 20 aa, Artificial Sequence
  Description of Artificial Sequence: targeting sequence/synthetic sequence
GGAKCHRKVLSDNIQGITKC

SEQ ID NO: 12062 - protein, 20 aa, Artificial Sequence
  Description of Artificial Sequence: targeting sequence/synthetic sequence
GAPGAPGGKGDAGAPGERGP

SEQ ID NO: 12063 - protein, 20 aa, Artificial Sequence
  Description of Artificial Sequence: targeting sequence/synthetic sequence
TQEKIKCEIDTLHDLSCKFL

SEQ ID NO: 12064 - protein, 20 aa, Artificial Sequence
  Description of Artificial Sequence: targeting sequence/synthetic sequence
LKLSSVNAADTAVYYCARVI

SEQ ID NO: 12065 - protein, 20 aa, Artificial Sequence
  Description of Artificial Sequence: targeting sequence/synthetic sequence
EAGKPGRPGERGPPGPQGAR

SEQ ID NO: 12066 - protein, 20 aa, Artificial Sequence
  Description of Artificial Sequence: targeting sequence/synthetic sequence
AGTASTGRRKRRRRRKPKQK

SEQ ID NO: 12067 - protein, 20 aa, Artificial Sequence
  Description of Artificial Sequence: targeting sequence/synthetic sequence
RISGLIYEETRGVLKVFLEN

SEQ ID NO: 12068 - protein, 20 aa, Artificial Sequence
  Description of Artificial Sequence: targeting sequence/synthetic sequence
GIPMAERQNNNWLKKFTEMT

SEQ ID NO: 12069 - protein, 20 aa, Artificial Sequence
  Description of Artificial Sequence: targeting sequence/synthetic sequence
FLVLLVLGFEVQGTQQPQQD

SEQ ID NO: 12070 - protein, 20 aa, Artificial Sequence
  Description of Artificial Sequence: targeting sequence/synthetic sequence
IAPKKTKPPLPSVQKLVEDR

SEQ ID NO: 12071 - protein, 20 aa, Artificial Sequence
  Description of Artificial Sequence: targeting sequence/synthetic sequence
NIFSCSVMHEALHNRFTQKS

SEQ ID NO: 12072 - protein, 20 aa, Artificial Sequence
  Description of Artificial Sequence: targeting sequence/synthetic sequence
GGFFLRIHPDGRVDGVREKS

SEQ ID NO: 12073 - protein, 20 aa, Artificial Sequence
  Description of Artificial Sequence: targeting sequence/synthetic sequence
GENGAPGPMGPRGAPGERGR

SEQ ID NO: 12074 - protein, 20 aa, Artificial Sequence
  Description of Artificial Sequence: targeting sequence/synthetic sequence
EHEEFGGGGGYGRRRRRRGG

SEQ ID NO: 12075 - protein, 20 aa, Artificial Sequence
  Description of Artificial Sequence: targeting sequence/synthetic sequence
VRKLTEDRWNKPQQTKGHRG

SEQ ID NO: 12076 - protein, 20 aa, Artificial Sequence
  Description of Artificial Sequence: targeting sequence/synthetic sequence
PGGKGEMGPAGIPGAPGLMG

SEQ ID NO: 12077 - protein, 20 aa, Artificial Sequence
  Description of Artificial Sequence: targeting sequence/synthetic sequence
SVQEKIFIEINTLHDLSLKF

SEQ ID NO: 12078 - protein, 20 aa, Artificial Sequence
  Description of Artificial Sequence: targeting sequence/synthetic sequence
SRACTCVPPHPQTAFCNSDL

SEQ ID NO: 12079 - protein, 20 aa, Artificial Sequence
  Description of Artificial Sequence: targeting sequence/synthetic sequence
DHPLKKLTEEFGPHTKAVSG

SEQ ID NO: 12080 - protein, 20 aa, Artificial Sequence
  Description of Artificial Sequence: targeting sequence/synthetic sequence
SVLSGGKLDRWEKIRLRPGG

SEQ ID NO: 12081 - protein, 20 aa, Artificial Sequence
  Description of Artificial Sequence: targeting sequence/synthetic sequence
NEMKRRRDFYAAHPSADAAN

SEQ ID NO: 12082 - protein, 20 aa, Artificial Sequence
  Description of Artificial Sequence: targeting sequence/synthetic sequence
KRRRDFYAAYPLTEVPNGSN

SEQ ID NO: 12083 - protein, 20 aa, Artificial Sequence
  Description of Artificial Sequence: targeting sequence/synthetic sequence
RSKERSKKRRKKKSSKRKHK

SEQ ID NO: 12084 - protein, 20 aa, Artificial Sequence
  Description of Artificial Sequence: targeting sequence/synthetic sequence
RGVVGLPGQRGERGFPGLPG

SEQ ID NO: 12085 - protein, 20 aa, Artificial Sequence
  Description of Artificial Sequence: targeting sequence/synthetic sequence
SNGGHFLRILPDGTVDGTRD

SEQ ID NO: 12086 - protein, 20 aa, Artificial Sequence
  Description of Artificial Sequence: targeting sequence/synthetic sequence
RVADTIARGPSNSEQIPALT

SEQ ID NO: 12087 - protein, 20 aa, Artificial Sequence
  Description of Artificial Sequence: targeting sequence/synthetic sequence
PPLPSVQKLVEDRWNKPQKT

SEQ ID NO: 12088 - protein, 20 aa, Artificial Sequence
  Description of Artificial Sequence: targeting sequence/synthetic sequence
LFGLFLSMYLVTVLGNLLII

SEQ ID NO: 12089 - protein, 20 aa, Artificial Sequence
  Description of Artificial Sequence: targeting sequence/synthetic sequence
EGLRLLAQAEDFDQMKNVAD

SEQ ID NO: 12090 - protein, 20 aa, Artificial Sequence
  Description of Artificial Sequence: targeting sequence/synthetic sequence
STITSREIQTAVRLLLPGEL

SEQ ID NO: 12091 - protein, 20 aa, Artificial Sequence
  Description of Artificial Sequence: targeting sequence/synthetic sequence
EQGPAGSPGFQGLPGPAGPP

SEQ ID NO: 12092 - protein, 20 aa, Artificial Sequence
  Description of Artificial Sequence: targeting sequence/synthetic sequence
GPAGAPGTPGPQGIAGQRGV

SEQ ID NO: 12093 - protein, 20 aa, Artificial Sequence
  Description of Artificial Sequence: targeting sequence/synthetic sequence
GEGSQMGLDECQFQFRNGRW

SEQ ID NO: 12094 - protein, 20 aa, Artificial Sequence
  Description of Artificial Sequence: targeting sequence/synthetic sequence
IAGPRGSPGERGETGPPGPA

SEQ ID NO: 12095 - protein, 20 aa, Artificial Sequence
  Description of Artificial Sequence: targeting sequence/synthetic sequence
PEGLAQLARADDYEQVKNVA

SEQ ID NO: 12096 - protein, 20 aa, Artificial Sequence
  Description of Artificial Sequence: targeting sequence/synthetic sequence
QDLLFTNQLKEHPTDFSVEF

1. A viral vector having a capsid protein comprising a heterologous targeting peptide in a range of 10-30 amino acids in length.

2-3. (canceled)

4. The viral vector of claim 1, wherein the viral vector is an adeno-associated virus (AAV) or a lentiviral vector.

5. (canceled)

6. The viral vector of claim 1, wherein the capsid protein is a VP1, VP2 or VP3 capsid protein.

7-8. (canceled)

9. The viral vector of claim 4, wherein the heterologous targeting peptide is inserted into an AAV capsid protein at loop 1 and/or loop 2.

10. The viral vector of claim 4, wherein the viral vector is an AAV5 or AAV9.

11. (canceled)

12. The viral vector of claim 10, wherein the heterologous targeting peptide is flanked by a linker peptide at the N-terminal and C-terminal ends of the heterologous targeting peptide.

13. (canceled)

14. The viral vector of claim 1, wherein the heterologous targeting peptide targets the viral vector to a cell selected from the group consisting of hepatocytes, neuronal cells, pancreatic cells, cardiac cells, renal cells, and muscle cells.

15. The viral vector of claim 1, wherein the heterologous targeting peptide targets the viral vector to a tissue selected from the group consisting of brain tissue, liver tissue, pancreas tissue, heart tissue, lung tissue, intestinal tissue, spleen tissue, kidney tissue and muscle tissue.

16-22. (canceled)

23. An adeno-associated virus (AAV) capsid protein comprising a heterologous targeting peptide cloned into loop 1 and/or loop 2 of the capsid protein, wherein the heterologous targeting peptide is about 10-30 amino acids in length.

24. The AAV capsid protein of claim 23, wherein the capsid protein is a VP1, VP2 or VP3 capsid protein.

25-28. (canceled)

29. The AAV capsid protein of claim 23, wherein the heterologous targeting peptide is flanked by a linker peptide at the N-terminal and C-terminal ends of the heterologous targeting peptide.

30. The AAV capsid protein of claim 23, wherein the heterologous targeting peptide targets a cell selected from the group consisting of hepatocytes, neuronal cells, pancreatic cells, cardiac cells, renal cells and muscle cells.

31. The AAV capsid protein of claim 23, wherein the heterologous targeting peptide targets a tissue selected from the group consisting of brain tissue, liver tissue, pancreas tissue, heat tissue, lung tissue, kidney tissue, intestinal tissue, spleen tissue and muscle tissue.

32-38. (canceled)

39. A recombinant AAV (rAAV) comprising a capsid protein of claim 23.

40. A recombinant AAV (rAAV) of claim 39 comprising a capsid protein having a targeting peptide in loop 1 and/or loop 2 wherein the targeting peptide is independently selected from SEQ ID Nos:5865 to 11445.

41. The recombinant AAV of claim 40, wherein the recombinant AAV further comprises a heterologous polynucleotide for gene delivery.

42. The recombinant AAV of claim 41, wherein the heterologous polynucleotide is a therapeutic gene.

43. A composition comprising the rAAV of claim 40.

44. The composition of claim 43 further comprising a pharmaceutically acceptable carrier.

45. A method for delivering a transgene to a subject comprising:
administering a recombinant AAV (rAAV) to a subject, wherein the rAAV comprises:
(i) a capsid protein of claim 23, and
(ii) at least one transgene, and wherein the rAAV infects cells of a target tissue of the subject.

46. The method of claim 45, wherein the at least one transgene encodes a protein an siRNA or an miRNA.

47. The method of claim 46, wherein the protein is an immunoglobulin heavy chain or light chain or fragment thereof.

48-52. (canceled)

53. The method of claim 45, wherein the transgene expresses a transcript that comprises at least one binding site for a miRNA, wherein the miRNA inhibits activity of the transgene, in a tissue other than the target tissue, by hybridizing to the binding site.

54. The method of claim 45, wherein the at least one transgene encodes a gene product that mediates genome editing.

55. The method of claim 45, wherein the transgene comprises a tissue specific promoter or inducible promoter.

56. (canceled)

57. The method of claim 45, wherein the rAAV is administered intravenously, intravascularly, transdermally, intraocularly, intrathecally, orally, intramuscularly, subcutaneously, intranasally, or by inhalation.

58. The method of claim 45, wherein the subject is selected from a mouse, a rat, a rabbit, a dog, a cat, a sheep, a pig, a human and a non-human primate.

59. (canceled)

60. An isolated nucleic acid encoding an AAV capsid protein containing an amino acid sequence selected from the group consisting of SEQ ID No:5865 to 11444 and 11445.

61-62. (canceled)

63. A kit for producing a rAAV, the kit comprising:
a container housing an isolated nucleic acid of claim 60.

64. (canceled)

65. The kit of claim 63, further comprising at least one container housing a recombinant AAV vector, wherein the recombinant AAV vector comprises a transgene.

66. A method for coating a virus or viral particle with membrane fragments comprising:
lysing donor cells in a hypotonic solution, which optionally may be combined with Dounce homogenization or sonication, in order to fractionate the cell membrane;
removing cells and cell debris by one or more rounds of centrifugation, leaving a membrane enriched fraction;
extruding the membrane enriched faction through polycarbonate membrane(s) to generate purified membrane fragments; and
coating virus or viral particles by coextruding the virus or viral particles with the purified membrane fragments through polycarbonate membrane(s).

67. The method of claim 66, wherein the viruses or viral particles are non-enveloped viruses or viral particles.

68. The method of claim 66, wherein the viruses or viral particles are enveloped viruses or viral particles which have had their viral envelope removed.

69. (canceled)

70. The method of claim 66, wherein the viruses or viral particles are adeno-associated viruses (AAV).

71. The method of claim 66, wherein the viruses or viral particles have been modified by directed evolution to have increased neutralizing antibody-evasion properties, as well as enhanced gene delivery, gene targeting, and/or enhanced capacity to infect.

72. The method of claim 66, wherein the viruses or viral particles have been modified by one or more amino acid substitutions in one or more regions of a viral capsid protein so as to reduce the affinity of the viral capsid protein for the major histocompatibility complex.

73. The method of claim 66, wherein the donor cells are mammalian cells.

74. (canceled)

75. The method of claim 73, where the donor cells are human stem cells, human progenitor cells, human primary cells, human somatic cells, human germline cells, or human tumor cells.

76. The method of claim 66, wherein the membranes of the donor cells have been modified to express or present a targeting ligand.

77. The method of claim 76, wherein the targeting ligand is used to improve entry of the coated viruses or viral particles into target cells, inhibit components of the immune response to the coated viruses or viral particles, or to target the coated viruses or viral particles to certain cell types or organs.

78. (canceled)

79. The method of claim 76, wherein the targeting ligand comprises a peptide of any one of SEQ ID Nos:5865 to 11445.

80. Coated viruses or viral particles made by the method of claim 66.

81-86. (canceled)

87. A method of preparing an engineered retroviral particle, the method comprising treating a retroviral particle with a detergent to remove a lipid envelop to obtain naked retroviral particles, isolating the naked retroviral particles and co-extruding a lipid envelop with the naked retroviral particles to obtain an engineered retroviral particle.
